(19) United States
(12) Patent Application Publication
(10) Pub. No.: US 2020/0371091 A1
(43) Pub. Date: Nov. 26, 2020

(54) BCMA-TARGETING CHIMERIC ANTIGEN RECEPTOR, AND USES THEREOF

(71) Applicants: Novartis AG, Basel (CH); The Trustees of the University of Pennsylvania, Philadelphia, PA (US)

(72) Inventors: Iulian Pruteanu-Malinici, Medford, MA (US); Keith Mansfield, Shrewsbury, MA (US); Boris Engels, Arlington, MA (US); Jan J. Melenhorst, Cherry Hill, NJ (US); Adam David Cohen, Bala Cynwyd, PA (US); Edward A. Stadtmauer, Bryn Mawr, PA (US); Alfred Garfall, Wallingford, PA (US); Michael C. Milone, Cherry Hill, NJ (US); Joseph A. Fraietta, Williamstown, NJ (US)

(21) Appl. No.: 16/768,260

(22) PCT Filed: Nov. 30, 2018
(86) PCT No.: PCT/US2018/063255

§ 371 Date: May 29, 2020

Related U.S. Application Data
(60) Provisional application No. 62/752,010, filed on Oct. 29, 2018.
(60) Provisional application No. 62/593,043, filed on Nov. 30, 2017.

(51) Int. Cl. G01N 33/50; A61K 35/17; A61P 35/02; A61K 45/06; A61K 39/395; C07K 16/28; C07K 16/24

(52) U.S. Cl. CPC G01N 33/5088; A61K 2039/505; A61K 35/17; A61P 35/02; A61K 45/06; A61K 39/39541; C07K 16/2887; C07K 16/2809; C07K 16/283; C07K 16/2896; C07K 16/244; C07K 16/245; C07K 16/2818; C07K 16/2878; G01N 2800/52; C07K 2317/31; C07K 2317/76; G01N 33/505

(57) ABSTRACT

The invention provides compositions and methods for treating diseases associated with expression of BCMA. The invention also relates to a method of administering a BCMA-targeting chimeric antigen receptor (CAR) therapy and an additional therapeutic agent.

### RELATED APPLICATIONS

[0001] This application claims priority to U.S. Ser. No. 62/593,043 filed Nov. 30, 2017, and U.S. Ser. No. 62/752,010 filed Oct. 29, 2018, the contents of each of which are incorporated herein by reference in their entirety.

### SEQUENCE LISTING

[0002] The instant application contains a Sequence Listing which has been submitted electronically in ASCII format and is hereby incorporated by reference in its entirety. Said ASCII copy, created on Nov. 28, 2018, is named N2067-7137WO_SL.txt and is 1,411,518 bytes in size.

### FIELD OF THE INVENTION

[0003] The present invention relates generally to the use of cells engineered to express a chimeric antigen receptor targeting B-cell maturation antigen protein (BCMA), optionally in combination with an additional therapeutic agent, to treat a disease associated with the expression of BCMA. The invention further describes prognostic biomarkers for BCMA-targeted therapies.

### BACKGROUND OF THE INVENTION

[0004] BCMA is a tumor necrosis family receptor (TNFR) member expressed on cells of the B-cell lineage. BCMA expression is the highest on terminally differentiated B cells that assume the long lived plasma cell fate, including plasma cells, plasmablasts and a subpopulation of activated B cells and memory B cells. BCMA is involved in mediating the survival of plasma cells for maintaining long-term humoral immunity. The expression of BCMA has been recently linked to a number of cancers, autoimmune disorders, and infectious diseases. Cancers with increased expression of BCMA include some hematological cancers, such as multiple myeloma (MM), Hodgkin's and non-Hodgkin's lymphoma, diffuse large B-cell lymphoma (DLBCL), various leukemias (e.g., chronic lymphocytic leukaemia (CLL)), and glioblastoma.

[0005] Given the ongoing need for improved strategies for targeting diseases such as cancer, new compositions and methods for improving therapeutic agents that target BCMA, e.g., anti-BCMA chimeric antigen receptor (CAR) therapies, are highly desirable.

### SUMMARY OF THE INVENTION

[0006] The disclosure features, at least in part, a method of treating a disease or disorder associated with expression of B-cell maturation antigen (BCMA, also known as TNFRSF17, BCM, or CD269). In certain embodiments, the disorder is a cancer, e.g., a hematological cancer. In some embodiments, the disclosure features a BCMA CAR-expressing cell therapy, e.g., as a monotherapy or in a combination therapy with an additional therapeutic agent. In some embodiments, the BCMA CAR-expressing cell therapy is a cell (e.g., a population of cells) that expresses a CAR molecule that binds BCMA. In some embodiments, the combination therapy maintains or has better clinical effectiveness as compared to either therapy alone. In one embodiment, the BCMA CAR-expressing cell therapy and the additional therapeutic agent are present in a single dose form, or as two or more dose forms. In one embodiment, provided herein is a composition comprising a BCMA CAR-expressing cell therapy and an additional therapeutic agent for use as a medicament. In one embodiment, provided herein is a composition comprising a BCMA CAR-expressing cell therapy and an additional therapeutic agent for use in the treatment of a disease associated with expression of BCMA. In one aspect, provided herein is a kit comprising a BCMA CAR-expressing cell therapy and an additional therapeutic agent. In some embodiments, the disclosure additional features methods of evaluating or predicting a subject's responsiveness to a BCMA CAR-expressing cell therapy, or methods of evaluating or predicting the potency of a BCMA CAR-expressing cell therapy in a subject. In some embodiments, a BCMA-targeting CAR therapy is manufactured or administered based on the acquisition of a level of a biomarker from a patient sample.

[0007] In one aspect, this invention features methods of predicting in vivo expansion of BCMA CAR T cells in a subject. In another aspect, featured herein are methods of predicting a subject's responsiveness to BCMA CAR T cells. In some embodiments, a higher CD4+:CD8+ T cell ratio in a leukapheresis product isolated from the subject can be used to predict greater in vivo expansion of BCMA CAR T cells in the subject and/or greater clinical responses of the subject to the BCMA CAR T cells. In some embodiments, a lower CD4+:CD8+ T cell ratio in a leukapheresis product isolated from the subject can be used to predict weaker in vivo expansion of BCMA CAR T cells in the subject and/or weaker clinical responses of the subject to the BCMA CAR T cells. In some embodiments, a higher CD4+:CD8+ T cell ratio in a seed culture at the start of the manufacturing of the BCMA CAR T cells (e.g., in a leukapheresis product after monocytes are removed) can be used to predict greater in vivo expansion of BCMA CAR T cells in the subject and/or greater clinical responses of the subject to the BCMA CAR T cells. In some embodiments, a lower CD4+:CD8+ T cell ratio in a seed culture at the start of the manufacturing of the BCMA CAR T cells (e.g., in a leukapheresis product after monocytes are removed) can be used to predict weaker in vivo expansion of BCMA CAR T cells in the subject and/or weaker clinical responses of the subject to the BCMA CAR T cells. In some embodiments, a higher CD4+:CD8+ T cell ratio in the subject's peripheral blood and/or bone marrow prior to the administration of the BCMA CAR T cells can be used to predict greater in vivo expansion of BCMA CAR T cells in the subject. In some embodiments, a lower CD4+:CD8+ T cell ratio in the subject's peripheral blood and/or bone marrow prior to the administration of the BCMA CAR T cells can be used to predict weaker in vivo expansion of BCMA CAR T cells in the subject.

[0008] In some embodiments, a higher frequency of CD8+ T cells with an “early-memory” phenotype (e.g., a higher frequency of CD45RO−CD27+CD8+ T cells) in a leukapheresis product isolated from the subject can be used to predict greater in vivo expansion of BCMA CAR T cells in the subject and/or greater clinical responses of the subject to the BCMA CAR T cells. In some embodiments, a lower frequency of CD8+ T cells with an “early-memory” phenotype (e.g., a lower frequency of CD45RO-CD27+CD8+ T cells) in a leukapheresis product isolated from the subject can be used to predict weaker in vivo expansion of BCMA CAR T cells in the subject and/or weaker clinical responses of the subject to the BCMA CAR T cells.

[0009] In some embodiments, greater in vitro expansion of seeded cells from the subject during manufacturing of the BCMA CAR T cells can be used to predict greater in vivo expansion of BCMA CAR T cells in the subject. In some embodiments, weaker in vitro expansion of seeded cells from the subject during manufacturing of the BCMA CAR T cells can be used to predict weaker in vivo expansion of BCMA CAR T cells in the subject.

[0010] In one aspect, provided herein is a method of evaluating or predicting a subject's responsiveness to a BCMA CAR-expressing cell therapy, wherein the subject has a disease associated with the expression of BCMA, comprising:

[0011] acquiring a value for one, two, three, four, five, or all of:

[0012] (i) the level or activity of CD4+ immune effector cells (e.g., CD4+ T cells) relative to the level or activity of CD8+ immune effector cells (e.g., CD8+ T cells) in the subject, e.g., in a sample from the subject (e.g., an apheresis sample (e.g., a leukapheresis sample), in a seed culture at the start of the manufacturing of the BCMA CAR-expressing cell therapy (e.g., a leukapheresis sample after monocytes are removed using elutriation)), or in the subject's peripheral blood and/or bone marrow prior to the administration of the BCMA CAR-expressing cell therapy,

[0013] (ii) the level or activity of CD8+ Tscm (stem cell memory T cells) in the subject, e.g., in a sample from the subject (e.g., an apheresis sample (e.g., a leukapheresis sample) or a seed culture at the start of the manufacturing of the BCMA CAR-expressing cell therapy (e.g., a leukapheresis sample after monocytes are removed using elutriation)),

[0014] (iii) the level or activity of HLADR-CD95+CD27+CD8+ cells in the subject, e.g., in a sample from the subject (e.g., an apheresis sample (e.g., a leukapheresis sample) or a seed culture at the start of the manufacturing of the BCMA CAR-expressing cell therapy (e.g., a leukapheresis sample after monocytes are removed using elutriation)),

[0015] (iv) the level or activity of CD45RO−CD27+CD8+ cells in the subject, e.g., in a sample from the subject (e.g., an apheresis sample (e.g., a leukapheresis sample) or a seed culture at the start of the manufacturing of the BCMA CAR-expressing cell therapy (e.g., a leukapheresis sample after monocytes are removed using elutriation)),

[0016] (v) the level or activity of CCR7+CD45RO−CD27+CD8+ cells in the subject, e.g., in a sample from the subject (e.g., an apheresis sample (e.g., a leukapheresis sample) or a seed culture at the start of the manufacturing of the BCMA CAR-expressing cell therapy (e.g., a leukapheresis sample after monocytes are removed using elutriation)), or

[0017] (vi) the proliferation of seeded cells from the subject during manufacturing of the BCMA CAR-expressing cell therapy, e.g., as measured by population doublings by day 9 (PDL9), wherein:

[0018] (a) an increase in the value of one, two, three, four, five, or all of (i)-(vi), as compared to a reference value, e.g., a non-responder reference value, is indicative or predictive of increased responsiveness of the subject to the BCMA CAR-expressing cell therapy; or

[0019] (b) a decrease in the value of one, two, three, four, five, or all of (i)-(vi), as compared to a reference value, e.g., a responder reference value, is indicative or predictive of decreased responsiveness of the subject to the BCMA CAR-expressing cell therapy,

[0020] thereby evaluating or predicting the subject's responsiveness to the BCMA CAR-expressing cell therapy.

[0021] In some embodiments, the method comprises acquiring a value for the level or activity of CD4+ immune effector cells (e.g., CD4+ T cells) relative to the level or activity of CD8+ immune effector cells (e.g., CD8+ T cells) in the subject, e.g., in a sample from the subject (e.g., an apheresis sample (e.g., a leukapheresis sample), in a seed culture at the start of the manufacturing of the BCMA CAR-expressing cell therapy (e.g., a leukapheresis sample after monocytes are removed using elutriation)), or in the subject's peripheral blood and/or bone marrow prior to the administration of the BCMA CAR-expressing cell therapy. In some embodiments, the method comprises acquiring a value for the level or activity of CD8+ Tscm (stem cell memory T cells) in the subject, e.g., in a sample from the subject (e.g., an apheresis sample (e.g., a leukapheresis sample) or a seed culture at the start of the manufacturing of the BCMA CAR-expressing cell therapy (e.g., a leukapheresis sample after monocytes are removed using elutriation)). In some embodiments, the method comprises acquiring a value for the level or activity of HLADR-CD95+CD27+CD8+ cells in the subject, e.g., in a sample from the subject (e.g., an apheresis sample (e.g., a leukapheresis sample) or a seed culture at the start of the manufacturing of the BCMA CAR-expressing cell therapy (e.g., a leukapheresis sample after monocytes are removed using elutriation)). In some embodiments, the method comprises acquiring a value for the level or activity of CD45RO−CD27+CD8+ cells in the subject, e.g., in a sample from the subject (e.g., an apheresis sample (e.g., a leukapheresis sample) or a seed culture at the start of the manufacturing of the BCMA CAR-expressing cell therapy (e.g., a leukapheresis sample after monocytes are removed using elutriation)). In some embodiments, the method comprises acquiring a value for the level or activity of CCR7+CD45RO−CD27+CD8+ cells in the subject, e.g., in a sample from the subject (e.g., an apheresis sample (e.g., a leukapheresis sample) or a seed culture at the start of the manufacturing of the BCMA CAR-expressing cell therapy (e.g., a leukapheresis sample after monocytes are removed using elutriation)). In some embodiments, the method comprises acquiring a value for the proliferation of seeded cells from the subject during manufacturing of the BCMA CAR-expressing cell therapy, e.g., population doublings by day 9 (PDL9).

[0022] In some embodiments, the increase in the value of one, two, three, four, five, or all of (i)-(vi), as compared to a reference value, e.g., a non-responder reference value, is indicative or predictive of increased responsiveness of the subject to the BCMA CAR-expressing cell therapy. In some embodiments, the decrease in the value of one, two, three, four, five, or all of (i)-(vi), as compared to a reference value, e.g., a responder reference value, is indicative or predictive of decreased responsiveness of the subject to the BCMA CAR-expressing cell therapy.

[0023] In some embodiments, the increase in the value of one, two, three, four, five, or all of (i)-(vi), as compared to a reference value, e.g., a non-responder reference value, is indicative or predictive of one, two, three, or all of:

[0024] (a) increased responsiveness of the subject to the BCMA CAR-expressing cell therapy;

[0025] (b) the subject as a responder of the BCMA CAR-expressing cell therapy;

[0026] (c) the subject as suitable for the BCMA CAR-expressing cell therapy; or

[0027] (d) increased expansion of the BCMA CAR-expressing cell therapy in the subject, e.g., as measured by an assay disclosed herein, e.g., as measured by the copy number of CAR transgenes per μg DNA using qPCR.

[0028] In some embodiments, the increase in the value of one, two, three, four, five, or all of (i)-(vi), as compared to a reference value, e.g., a non-responder reference value, is indicative or predictive of increased responsiveness of the subject to the BCMA CAR-expressing cell therapy. In some embodiments, the increase in the value of one, two, three, four, five, or all of (i)-(vi), as compared to a reference value, e.g., a non-responder reference value, is indicative or predictive of the subject as a responder of the BCMA CAR-expressing cell therapy. In some embodiments, the increase in the value of one, two, three, four, five, or all of (i)-(vi), as compared to a reference value, e.g., a non-responder reference value, is indicative or predictive of the subject as suitable for the BCMA CAR-expressing cell therapy. In some embodiments, the increase in the value of one, two, three, four, five, or all of (i)-(vi), as compared to a reference value, e.g., a non-responder reference value, is indicative or predictive of increased expansion of the BCMA CAR-expressing cell therapy in the subject, e.g., as measured by an assay disclosed herein, e.g., as measured by the copy number of CAR transgenes per μg DNA using qPCR.

[0029] In some embodiments, the decrease in the value of one, two, three, four, five, or all of (i)-(vi), as compared to a reference value, e.g., a responder reference value, is indicative or predictive of one, two, or all of:

[0030] (a) decreased responsiveness of the subject to the BCMA CAR-expressing cell therapy;

[0031] (b) the subject as a non-responder of the BCMA CAR-expressing cell therapy; or

[0032] (c) decreased expansion of the BCMA CAR-expressing cell therapy in the subject, e.g., as measured by an assay disclosed herein, e.g., as measured by the copy number of CAR transgenes per μg DNA using qPCR.

[0033] In some embodiments, the decrease in the value of one, two, three, four, five, or all of (i)-(vi), as compared to a reference value, e.g., a responder reference value, is indicative or predictive of decreased responsiveness of the subject to the BCMA CAR-expressing cell therapy. In some embodiments, the decrease in the value of one, two, three, four, five, or all of (i)-(vi), as compared to a reference value, e.g., a responder reference value, is indicative or predictive of the subject as a non-responder of the BCMA CAR-expressing cell therapy. In some embodiments, the decrease in the value of one, two, three, four, five, or all of (i)-(vi), as compared to a reference value, e.g., a responder reference value, is indicative or predictive of decreased expansion of the BCMA CAR-expressing cell therapy in the subject, e.g., as measured by an assay disclosed herein, e.g., as measured by the copy number of CAR transgenes per μg DNA using qPCR.

[0034] In some embodiments, the value for the level or activity of CD4+ immune effector cells (e.g., CD4+ T cells) relative to the level or activity of CD8+ immune effector cells (e.g., CD8+ T cells) comprises a ratio of the amount of CD4+ immune effector cells (e.g., CD4+ T cells) to the amount of CD8+ immune effector cells (e.g., CD8+ T cells), e.g., as measured by an assay disclosed herein, e.g., flow cytometry. In some embodiments,

[0035] In some embodiments, the ratio being:

[0036] (1) greater than or equal to 1 (e.g., between 1 and 5, e.g., between 1 and 3.5); or

[0037] (2) greater than or equal to 1.6 (e.g., between 1.6 and 5, e.g., between 1.6 and 3.5), is indicative or predictive of one, two, three, or all of:

[0038] (a) increased responsiveness of the subject to the BCMA CAR-expressing cell therapy;

[0039] (b) the subject as a responder of the BCMA CAR-expressing cell therapy;

[0040] (c) the subject as suitable for the BCMA CAR-expressing cell therapy; or

[0041] (d) increased expansion of the BCMA CAR-expressing cell therapy in the subject, e.g., as measured by an assay disclosed herein, e.g., as measured by the copy number of CAR transgenes per μg DNA using qPCR.

[0042] In some embodiments, the ratio being less than 1 (e.g., between 0.001 and 1) is indicative or predictive of one, two, or all of:

[0043] (a) decreased responsiveness of the subject to the BCMA CAR-expressing cell therapy;

[0044] (b) the subject as a non-responder of the BCMA CAR-expressing cell therapy; or

[0045] (c) decreased expansion of the BCMA CAR-expressing cell therapy in the subject, e.g., as measured by an assay disclosed herein, e.g., as measured by the copy number of CAR transgenes per μg DNA using qPCR.

[0046] In some embodiments, the value for the level or activity of CD8+ Tscm (stem cell memory T cells) comprises the percentage of CD8+ Tscm (stem cell memory T cells) among CD8+ T cells, e.g., as measured by an assay disclosed herein, e.g., flow cytometry.

[0047] In some embodiments, the value for the level or activity of HLADR-CD95+CD27+CD8+ cells comprises the percentage of HLADR-CD95+CD27+CD8+ cells among CD8+ T cells, e.g., as measured by an assay disclosed herein, e.g., flow cytometry.

[0048] In some embodiments, the percentage of HLADR-CD95+CD27+CD8+ cells among CD8+ T cells being greater than or equal to 25% (e.g., between 30% and 90%, e.g., between 35% and 85%, e.g., between 40% and 80%, e.g., between 45% and 75%, e.g., between 50% and 75%) is indicative or predictive of one, two, three, or all of:

[0049] (a) increased responsiveness of the subject to the BCMA CAR-expressing cell therapy;

[0050] (b) the subject as a responder of the BCMA CAR-expressing cell therapy;

[0051] (c) the subject as suitable for the BCMA CAR-expressing cell therapy; or

[0052] (d) increased expansion of the BCMA CAR-expressing cell therapy in the subject, e.g., as measured by an assay disclosed herein, e.g., as measured by the copy number of CAR transgenes per μg DNA using qPCR.

[0053] In some embodiments, the percentage of HLADR-CD95+CD27+CD8+ cells among CD8+ T cells being less than 25% (e.g., between 0.1% and 25%, e.g., between 0.1% and 22%, e.g., between 0.1% and 20%, e.g., between 0.1% and 18%, e.g., between 0.1% and 15%)) is indicative or predictive of one, two, or all of:

[0054] (a) decreased responsiveness of the subject to the BCMA CAR-expressing cell therapy;

[0055] (b) the subject as a non-responder of the BCMA CAR-expressing cell therapy; or

[0056] (c) decreased expansion of the BCMA CAR-expressing cell therapy in the subject, e.g., as measured by an assay disclosed herein, e.g., as measured by the copy number of CAR transgenes per μg DNA using qPCR.

[0057] In some embodiments, the value for the level or activity of CD45RO−CD27+CD8+ cells comprises the percentage of CD45RO−CD27+CD8+ cells among CD8+ T cells, e.g., as measured by an assay disclosed herein, e.g., flow cytometry.

[0058] In some embodiments, the percentage of CD45RO−CD27+CD8+ cells among CD8+ T cells being greater than or equal to 20% (e.g., between 20% and 90%, e.g., between 20% and 80%, e.g., between 20% and 70%, e.g., between 20% and 60%) is indicative or predictive of one, two, three, or all of:

[0059] (a) increased responsiveness of the subject to the BCMA CAR-expressing cell therapy;

[0060] (b) the subject as a responder of the BCMA CAR-expressing cell therapy;

[0061] (c) the subject as suitable for the BCMA CAR-expressing cell therapy; or

[0062] (d) increased expansion of the BCMA CAR-expressing cell therapy in the subject, e.g., as measured by an assay disclosed herein, e.g., as measured by the copy number of CAR transgenes per μg DNA using qPCR.

[0063] In some embodiments, the percentage of CD45RO−CD27+CD8+ cells among CD8+ T cells being less than 20% (e.g., between 0.1% and 20%, e.g., between 0.1% and 18%, e.g., between 0.1% and 15%, e.g., between 0.1% and 12%, e.g., between 0.1% and 10%) is indicative or predictive of one, two, or all of:

[0064] (a) decreased responsiveness of the subject to the BCMA CAR-expressing cell therapy;

[0065] (b) the subject as a non-responder of the BCMA CAR-expressing cell therapy; or

[0066] (c) decreased expansion of the BCMA CAR-expressing cell therapy in the subject, e.g., as measured by an assay disclosed herein, e.g., as measured by the copy number of CAR transgenes per μg DNA using qPCR.

[0067] In some embodiments, the value for the level or activity of CCR7+CD45RO−CD27+CD8+ cells comprises the percentage of CCR7+CD45RO−CD27+CD8+ cells among CD8+ T cells, e.g., as measured by an assay disclosed herein, e.g., flow cytometry.

[0068] In some embodiments, the percentage of CCR7+CD45RO−CD27+CD8+ cells among CD8+ T cells being greater than or equal to 15% (e.g., between 15% and 90%, e.g., between 15% and 80%, e.g., between 15% and 70%, e.g., between 15% and 60%, e.g., between 15% and 50%) is indicative or predictive of one, two, three, or all of:

[0069] (a) increased responsiveness of the subject to the BCMA CAR-expressing cell therapy;

[0070] (b) the subject as a responder of the BCMA CAR-expressing cell therapy;

[0071] (c) the subject as suitable for the BCMA CAR-expressing cell therapy; or

[0072] (d) increased expansion of the BCMA CAR-expressing cell therapy in the subject, e.g., as measured by an assay disclosed herein, e.g., as measured by the copy number of CAR transgenes per μg DNA using qPCR.

[0073] In some embodiments, the percentage of CCR7+CD45RO−CD27+CD8+ cells among CD8+ T cells being less than 15% (e.g., between 0.1% and 15%, e.g., between 0.1% and 12%, e.g., between 0.1% and 10%, e.g., between 0.1% and 8%) is indicative or predictive of one, two, or all of:

[0074] (a) decreased responsiveness of the subject to the BCMA CAR-expressing cell therapy;

[0075] (b) the subject as a non-responder of the BCMA CAR-expressing cell therapy; or

[0076] (c) decreased expansion of the BCMA CAR-expressing cell therapy in the subject, e.g., as measured by an assay disclosed herein, e.g., as measured by the copy number of CAR transgenes per μg DNA using qPCR.

[0077] In some embodiments, the value for the proliferation of seeded cells from the subject during manufacturing of the BCMA CAR-expressing cell therapy comprises the fold expansion of seeded cells from the subject during manufacturing (e.g., total cell counts at the end of manufacturing relative to at the start of manufacturing) of the BCMA CAR-expressing cell therapy, e.g., as measured by an assay disclosed herein, e.g., as measured by cell counting.

[0078] In some embodiments, the method further comprises performing:

[0079] manufacturing the BCMA CAR-expressing cell therapy using cells (e.g., T cells) from the subject and administering the BCMA CAR-expressing cell therapy to the subject; or

[0080] administering, e.g., initiating administering or continuing administering, the BCMA CAR-expressing cell therapy to the subject, when:

[0081] (a) the subject was indicated or predicted to have increased responsiveness to the BCMA CAR-expressing cell therapy;

[0082] (b) the subject was indicated or predicted as a responder of the BCMA CAR-expressing cell therapy;

[0083] (c) the subject was indicated or predicted as suitable for the BCMA CAR-expressing cell therapy; or

[0084] (d) the BCMA CAR-expressing cell therapy was indicated or predicted to have increased expansion in the subject, e.g., as measured by an assay disclosed herein, e.g., as measured by the copy number of CAR transgenes per μg DNA using qPCR.

[0085] In some embodiments, the method further comprises performing one, two, three, four, five, six, seven, or all of:

[0086] administering an altered dosing regimen of the BCMA CAR-expressing cell therapy (e.g., a dosing regimen with a higher dose and/or more frequent administration than a reference dosing regimen) to the subject;

[0087] administering a second therapy (e.g., a second therapy that is not the BCMA CAR-expressing cell therapy) to the subject;

[0088] administering the BCMA CAR-expressing cell therapy and a second therapy to the subject;

[0089] discontinuing administration of the BCMA CAR-expressing cell therapy and optionally administering a second therapy to the subject;

[0090] modifying a manufacturing process of the BCMA CAR-expressing cell therapy, e.g., enriching for CD4+ immune effector cells (e.g., CD4+ T cells) relative to CD8+ immune effector cells (CD8+ T cells) prior to introducing a nucleic acid encoding a BCMA CAR, and administering the BCMA CAR-expressing cell therapy generated by the modified manufacturing process to the subject;

[0091] modifying a manufacturing process of the BCMA CAR-expressing cell therapy, e.g., enriching for CD8+ Tscm (e.g., HLADR-CD95+CD27+CD8+ cells, CD45RO−CD27+CD8+ cells, or CCR7+CD45RO−CD27+CD8+ cells) prior to introducing a nucleic acid encoding a BCMA CAR, and administering the BCMA CAR-expressing cell therapy generated by the modified manufacturing process to the subject;

[0092] modifying a manufacturing process of the BCMA CAR-expressing cell therapy, e.g., increasing the proliferation of seeded cells from the subject during the manufacturing of the BCMA CAR-expressing cell therapy, and administering the BCMA CAR-expressing cell therapy generated by the modified manufacturing process to the subject; or

[0093] administering a pretreatment to the subject, wherein the pretreatment increases the ratio of the amount of CD4+ immune effector cells (e.g., CD4+ T cells) to the amount of CD8+ immune effector cells (e.g., CD8+ T cells) in the subject, e.g., in a sample from the subject (e.g., an apheresis sample (e.g., a leukapheresis sample), in a seed culture at the start of the manufacturing of the BCMA CAR-expressing cell therapy (e.g., a leukapheresis sample after monocytes are removed using elutriation)), or in the subject's peripheral blood and/or bone marrow prior to the administration of the BCMA CAR-expressing cell therapy, e.g., the pretreatment increases the ratio to greater than or equal to 1.6 (e.g., between 1.6 and 5, e.g., between 1.6 and 3.5), manufacturing the BCMA CAR-expressing cell therapy using cells (e.g., T cells) from the subject, and administering the BCMA CAR-expressing cell therapy to the subject, when:

[0094] (a) the subject was indicated or predicted to have decreased responsiveness to the BCMA CAR-expressing cell therapy;

[0095] (b) the subject was indicated or predicted as a non-responder of the BCMA CAR-expressing cell therapy; or

[0096] (c) the BCMA CAR-expressing cell therapy was indicated or predicted to have decreased expansion in the subject, e.g., as measured by an assay disclosed herein, e.g., as measured by the copy number of CAR transgenes per μg DNA using qPCR.

[0097] In one aspect, disclosed herein is a method of treating a subject having a disease associated with the expression of BCMA, comprising:

[0098] responsive to an increased value for one, two, three, four, five, or all of:

[0099] (i) the level or activity of CD4+ immune effector cells (e.g., CD4+ T cells) relative to the level or activity of CD8+ immune effector cells (e.g., CD8+ T cells) in the subject, e.g., in a sample from the subject (e.g., an apheresis sample (e.g., a leukapheresis sample), in a seed culture at the start of the manufacturing of a BCMA CAR-expressing cell therapy (e.g., a leukapheresis sample after monocytes are removed using elutriation)), or in the subject's peripheral blood and/or bone marrow prior to the administration of the BCMA CAR-expressing cell therapy,

[0100] (ii) the level or activity of CD8+ Tscm (stem cell memory T cells) in the subject, e.g., in a sample from the subject (e.g., an apheresis sample (e.g., a leukapheresis sample) or a seed culture at the start of the manufacturing of a BCMA CAR-expressing cell therapy (e.g., a leukapheresis sample after monocytes are removed using elutriation)),

[0101] (iii) the level or activity of HLADR-CD95+CD27+CD8+ cells in the subject, e.g., in a sample from the subject (e.g., an apheresis sample (e.g., a leukapheresis sample) or a seed culture at the start of the manufacturing of a BCMA CAR-expressing cell therapy (e.g., a leukapheresis sample after monocytes are removed using elutriation)),

[0102] (iv) the level or activity of CD45RO−CD27+CD8+ cells in the subject, e.g., in a sample from the subject (e.g., an apheresis sample (e.g., a leukapheresis sample) or a seed culture at the start of the manufacturing of a BCMA CAR-expressing cell therapy (e.g., a leukapheresis sample after monocytes are removed using elutriation)),

[0103] (v) the level or activity of CCR7+CD45RO−CD27+CD8+ cells in the subject, e.g., in a sample from the subject (e.g., an apheresis sample (e.g., a leukapheresis sample) or a seed culture at the start of the manufacturing of a BCMA CAR-expressing cell therapy (e.g., a leukapheresis sample after monocytes are removed using elutriation)), or

[0104] (vi) the proliferation of seeded cells from the subject during manufacturing of a BCMA CAR-expressing cell therapy,

[0105] as compared to a reference value, e.g., a non-responder reference value, performing:

[0106] manufacturing a BCMA CAR-expressing cell therapy using cells (e.g., T cells) from the subject and administering the BCMA CAR-expressing cell therapy to the subject; or

[0107] administering, e.g., initiating administering or continuing administering, a BCMA CAR-expressing cell therapy to the subject,

[0108] thereby treating the subject having the disease associated with the expression of BCMA.

[0109] In some embodiments, the method comprises: responsive to an increased value for one, two, three, four, five, or all of (i)-(vi), identifying or predicting one, two, three, or all of:

[0110] (a) the subject as having increased responsiveness to the BCMA CAR-expressing cell therapy;

[0111] (b) the subject as a responder of the BCMA CAR-expressing cell therapy;

[0112] (c) the subject as suitable for the BCMA CAR-expressing cell therapy; or

[0113] (d) the BCMA CAR-expressing cell therapy as having increased expansion in the subject, e.g., as measured by an assay disclosed herein, e.g., as measured by the copy number of CAR transgenes per μg DNA using qPCR.

[0114] In one aspect, disclosed herein is a method of treating a subject having a disease associated with the expression of BCMA, comprising:

[0115] responsive to a decreased value for one, two, three, four, five, or all of:

[0116] (i) the level or activity of CD4+ immune effector cells (e.g., CD4+ T cells) relative to the level or activity of CD8+ immune effector cells (e.g., CD8+ T cells) in the subject, e.g., in a sample from the subject (e.g., an apheresis sample (e.g., a leukapheresis sample), in a seed culture at the start of the manufacturing of a BCMA CAR-expressing cell therapy (e.g., a leukapheresis sample after monocytes are removed using elutriation)), or in the subject's peripheral blood and/or bone marrow prior to the administration of the BCMA CAR-expressing cell therapy,

[0117] (ii) the level or activity of CD8+ Tscm (stem cell memory T cells) in the subject, e.g., in a sample from the subject (e.g., an apheresis sample (e.g., a leukapheresis sample) or a seed culture at the start of the manufacturing of a BCMA CAR-expressing cell therapy (e.g., a leukapheresis sample after monocytes are removed using elutriation)),

[0118] (iii) the level or activity of HLADR-CD95+CD27+CD8+ cells in the subject, e.g., in a sample from the subject (e.g., an apheresis sample (e.g., a leukapheresis sample) or a seed culture at the start of the manufacturing of a BCMA CAR-expressing cell therapy (e.g., a leukapheresis sample after monocytes are removed using elutriation)),

[0119] (iv) the level or activity of CD45RO−CD27+CD8+ cells in the subject, e.g., in a sample from the subject (e.g., an apheresis sample (e.g., a leukapheresis sample) or a seed culture at the start of the manufacturing of a BCMA CAR-expressing cell therapy (e.g., a leukapheresis sample after monocytes are removed using elutriation)),

[0120] (v) the level or activity of CCR7+CD45RO−CD27+CD8+ cells in the subject, e.g., in a sample from the subject (e.g., an apheresis sample (e.g., a leukapheresis sample) or a seed culture at the start of the manufacturing of a BCMA CAR-expressing cell therapy (e.g., a leukapheresis sample after monocytes are removed using elutriation)), or

[0121] (vi) the proliferation of seeded cells from the subject during manufacturing of a BCMA CAR-expressing cell therapy,

[0122] as compared to a reference value, e.g., a responder reference value, performing one, two, three, four, five, six, seven, or all of:

[0123] administering an altered dosing regimen of a BCMA CAR-expressing cell therapy (e.g., a dosing regimen with a higher dose and/or more frequent administration than a reference dosing regimen) to the subject;

[0124] administering a second therapy (e.g., a second therapy that is not a BCMA CAR-expressing cell therapy) to the subject;

[0125] administering a BCMA CAR-expressing cell therapy and a second therapy to the subject;

[0126] discontinuing administration of a BCMA CAR-expressing cell therapy and optionally administering a second therapy to the subject;

[0127] modifying a manufacturing process of a BCMA CAR-expressing cell therapy, e.g., enriching for CD4+ immune effector cells (e.g., CD4+ T cells) relative to CD8+ immune effector cells (CD8+ T cells) prior to introducing a nucleic acid encoding a BCMA CAR, and administering the BCMA CAR-expressing cell therapy generated by the modified manufacturing process to the subject;

[0128] modifying a manufacturing process of a BCMA CAR-expressing cell therapy, e.g., enriching for CD8+ Tscm (e.g., HLADR-CD95+CD27+CD8+ cells, CD45RO−CD27+CD8+ cells, or CCR7+CD45RO−CD27+CD8+ cells) prior to introducing a nucleic acid encoding a BCMA CAR, and administering the BCMA CAR-expressing cell therapy generated by the modified manufacturing process to the subject;

[0129] modifying a manufacturing process of the BCMA CAR-expressing cell therapy, e.g., increasing the proliferation of seeded cells from the subject during the manufacturing of the BCMA CAR-expressing cell therapy, and administering the BCMA CAR-expressing cell therapy generated by the modified manufacturing process to the subject; or

[0130] administering a pretreatment to the subject, wherein the pretreatment increases the ratio of the amount of CD4+ immune effector cells (e.g., CD4+ T cells) to the amount of CD8+ immune effector cells (e.g., CD8+ T cells) in the subject, e.g., in a sample from the subject (e.g., an apheresis sample (e.g., a leukapheresis sample), in a seed culture at the start of the manufacturing of a BCMA CAR-expressing cell therapy (e.g., a leukapheresis sample after monocytes are removed using elutriation)), or in the subject's peripheral blood and/or bone marrow prior to the administration of the BCMA CAR-expressing cell therapy, e.g., the pretreatment increases the ratio to greater than or equal to 1.6 (e.g., between 1.6 and 5, e.g., between 1.6 and 3.5), manufacturing the BCMA CAR-expressing cell therapy using cells (e.g., T cells) from the subject, and administering the BCMA CAR-expressing cell therapy to the subject,

[0131] thereby treating the subject having the disease associated with the expression of BCMA.

[0132] In some embodiments, the method comprises: response to a decreased value for one, two, three, four, five, or all of (i)-(vi), identifying or predicting one, two, or all of:

[0133] (a) the subject as having decreased responsiveness to the BCMA CAR-expressing cell therapy;

[0134] (b) the subject as a non-responder of the BCMA CAR-expressing cell therapy; or

[0135] (c) the BCMA CAR-expressing cell therapy as having decreased expansion in the subject, e.g., as measured by an assay disclosed herein, e.g., as measured by the copy number of CAR transgenes per μg DNA using qPCR.

[0136] In some embodiments, the value for the level or activity of CD4+ immune effector cells (e.g., CD4+ T cells) relative to the level or activity of CD8+ immune effector cells (e.g., CD8+ T cells) comprises a ratio of the amount of CD4+ immune effector cells (e.g., CD4+ T cells) to the amount of CD8+ immune effector cells (e.g., CD8+ T cells), e.g., as measured by an assay disclosed herein, e.g., flow cytometry.

[0137] In some embodiments, the method comprises:

[0138] responsive to the ratio being:

[0139] (1) greater than or equal to 1 (e.g., between 1 and 5, e.g., between 1 and 3.5); or

[0140] (2) greater than or equal to 1.6 (e.g., between 1.6 and 5, e.g., between 1.6 and 3.5), performing:

[0141] manufacturing a BCMA CAR-expressing cell therapy using cells (e.g., T cells) from the subject and administering the BCMA CAR-expressing cell therapy to the subject; or

[0142] administering, e.g., initiating administering or continuing administering, a BCMA CAR-expressing cell therapy to the subject.

[0143] In some embodiments, the method comprises:

[0144] responsive to the ratio being less than 1 (e.g., between 0.001 and 1), performing one, two, three, four, five, six, seven, or all of:

[0145] administering an altered dosing regimen of a BCMA CAR-expressing cell therapy (e.g., a dosing regimen with a higher dose and/or more frequent administration than a reference dosing regimen) to the subject;

[0146] administering a second therapy (e.g., a second therapy that is not a BCMA CAR-expressing cell therapy) to the subject;

[0147] administering a BCMA CAR-expressing cell therapy and a second therapy to the subject;

[0148] discontinuing administration of a BCMA CAR-expressing cell therapy and optionally administering a second therapy to the subject;

[0149] modifying a manufacturing process of a BCMA CAR-expressing cell therapy, e.g., enriching for CD4+ immune effector cells (e.g., CD4+ T cells) relative to CD8+ immune effector cells (CD8+ T cells) prior to introducing a nucleic acid encoding a BCMA CAR, and administering the BCMA CAR-expressing cell therapy generated by the modified manufacturing process to the subject;

[0150] modifying a manufacturing process of a BCMA CAR-expressing cell therapy, e.g., enriching for CD8+ Tscm (e.g., HLADR-CD95+CD27+CD8+ cells, CD45RO−CD27+CD8+ cells, or CCR7+CD45RO−CD27+CD8+ cells) prior to introducing a nucleic acid encoding a BCMA CAR, and administering the BCMA CAR-expressing cell therapy generated by the modified manufacturing process to the subject;

[0151] modifying a manufacturing process of the BCMA CAR-expressing cell therapy, e.g., increasing the proliferation of seeded cells from the subject during the manufacturing of the BCMA CAR-expressing cell therapy, and administering the BCMA CAR-expressing cell therapy generated by the modified manufacturing process to the subject; or

[0152] administering a pretreatment to the subject, wherein the pretreatment increases the ratio of the amount of CD4+ immune effector cells (e.g., CD4+ T cells) to the amount of CD8+ immune effector cells (e.g., CD8+ T cells) in the subject, e.g., in a sample from the subject (e.g., an apheresis sample (e.g., a leukapheresis sample), in a seed culture at the start of the manufacturing of a BCMA CAR-expressing cell therapy (e.g., a leukapheresis sample after monocytes are removed using elutriation)), or in the subject's peripheral blood and/or bone marrow prior to the administration of the BCMA CAR-expressing cell therapy, e.g., the pretreatment increases the ratio to greater than or equal to 1.6 (e.g., between 1.6 and 5, e.g., between 1.6 and 3.5), manufacturing the BCMA CAR-expressing cell therapy using cells (e.g., T cells) from the subject, and administering the BCMA CAR-expressing cell therapy to the subject.

[0153] In some embodiments, the value for the level or activity of CD8+ Tscm (stem cell memory T cells) comprises the percentage of CD8+ Tscm (stem cell memory T cells) among CD8+ T cells, e.g., as measured by an assay disclosed herein, e.g., flow cytometry.

[0154] In some embodiments, the value for the level or activity of HLADR-CD95+CD27+CD8+ cells comprises the percentage of HLADR-CD95+CD27+CD8+ cells among CD8+ T cells, e.g., as measured by an assay disclosed herein, e.g., flow cytometry.

[0155] In some embodiments, the method comprises:

[0156] responsive to the percentage of HLADR-CD95+CD27+CD8+ cells among CD8+ T cells being greater than or equal to 25% (e.g., between 30% and 90%, e.g., between 35% and 85%, e.g., between 40% and 80%, e.g., between 45% and 75%, e.g., between 50% and 75%), performing:

[0157] manufacturing a BCMA CAR-expressing cell therapy using cells (e.g., T cells) from the subject and administering the BCMA CAR-expressing cell therapy to the subject; or

[0158] administering, e.g., initiating administering or continuing administering, a BCMA CAR-expressing cell therapy to the subject.

[0159] In some embodiments, the method comprises:

[0160] responsive to the percentage of HLADR-CD95+CD27+CD8+ cells among CD8+ T cells being less than 25% (e.g., between 0.1% and 25%, e.g., between 0.1% and 22%, e.g., between 0.1% and 20%, e.g., between 0.1% and 18%, e.g., between 0.1% and 15%), performing one, two, three, four, five, six, seven, or all of:

[0161] administering an altered dosing regimen of a BCMA CAR-expressing cell therapy (e.g., a dosing regimen with a higher dose and/or more frequent administration than a reference dosing regimen) to the subject;

[0162] administering a second therapy (e.g., a second therapy that is not a BCMA CAR-expressing cell therapy) to the subject;

[0163] administering a BCMA CAR-expressing cell therapy and a second therapy to the subject;

[0164] discontinuing administration of a BCMA CAR-expressing cell therapy and optionally administering a second therapy to the subject;

[0165] modifying a manufacturing process of a BCMA CAR-expressing cell therapy, e.g., enriching for CD4+ immune effector cells (e.g., CD4+ T cells) relative to CD8+ immune effector cells (CD8+ T cells) prior to introducing a nucleic acid encoding a BCMA CAR, and administering the BCMA CAR-expressing cell therapy generated by the modified manufacturing process to the subject;

[0166] modifying a manufacturing process of a BCMA CAR-expressing cell therapy, e.g., enriching for CD8+ Tscm (e.g., HLADR-CD95+CD27+CD8+ cells, CD45RO−CD27+CD8+ cells, or CCR7+CD45RO−CD27+CD8+ cells) prior to introducing a nucleic acid encoding a BCMA CAR, and administering the BCMA CAR-expressing cell therapy generated by the modified manufacturing process to the subject;

[0167] modifying a manufacturing process of the BCMA CAR-expressing cell therapy, e.g., increasing the proliferation of seeded cells from the subject during the manufacturing of the BCMA CAR-expressing cell therapy, and administering the BCMA CAR-expressing cell therapy generated by the modified manufacturing process to the subject; or

[0168] administering a pretreatment to the subject, wherein the pretreatment increases the ratio of the amount of CD4+ immune effector cells (e.g., CD4+ T cells) to the amount of CD8+ immune effector cells (e.g., CD8+ T cells) in the subject, e.g., in a sample from the subject (e.g., an apheresis sample (e.g., a leukapheresis sample), in a seed culture at the start of the manufacturing of a BCMA CAR-expressing cell therapy (e.g., a leukapheresis sample after monocytes are removed using elutriation)), or in the subject's peripheral blood and/or bone marrow prior to the administration of the BCMA CAR-expressing cell therapy, e.g., the pretreatment increases the ratio to greater than or equal to 1.6 (e.g., between 1.6 and 5, e.g., between 1.6 and 3.5), manufacturing the BCMA CAR-expressing cell therapy using cells (e.g., T cells) from the subject, and administering the BCMA CAR-expressing cell therapy to the subject.

[0169] In some embodiments, the value for the level or activity of CD45RO−CD27+CD8+ cells comprises the percentage of CD45RO−CD27+CD8+ cells among CD8+ T cells, e.g., as measured by an assay disclosed herein, e.g., flow cytometry.

[0170] In some embodiments, the method comprises:

[0171] responsive to the percentage of CD45RO−CD27+CD8+ cells among CD8+ T cells being greater than or equal to 20% (e.g., between 20% and 90%, e.g., between 20% and 80%, e.g., between 20% and 70%, e.g., between 20% and 60%), performing:

[0172] manufacturing a BCMA CAR-expressing cell therapy using cells (e.g., T cells) from the subject and administering the BCMA CAR-expressing cell therapy to the subject; or

[0173] administering, e.g., initiating administering or continuing administering, a BCMA CAR-expressing cell therapy to the subject.

[0174] In some embodiments, the method comprises:

[0175] responsive to the percentage of CD45RO−CD27+CD8+ cells among CD8+ T cells being less than 20% (e.g., between 0.1% and 20%, e.g., between 0.1% and 18%, e.g., between 0.1% and 15%, e.g., between 0.1% and 12%, e.g., between 0.1% and 10%), performing one, two, three, four, five, six, seven, or all of:

[0176] administering an altered dosing regimen of a BCMA CAR-expressing cell therapy (e.g., a dosing regimen with a higher dose and/or more frequent administration than a reference dosing regimen) to the subject;

[0177] administering a second therapy (e.g., a second therapy that is not a BCMA CAR-expressing cell therapy) to the subject;

[0178] administering a BCMA CAR-expressing cell therapy and a second therapy to the subject;

[0179] discontinuing administration of a BCMA CAR-expressing cell therapy and optionally administering a second therapy to the subject;

[0180] modifying a manufacturing process of a BCMA CAR-expressing cell therapy, e.g., enriching for CD4+ immune effector cells (e.g., CD4+ T cells) relative to CD8+ immune effector cells (CD8+ T cells) prior to introducing a nucleic acid encoding a BCMA CAR, and administering the BCMA CAR-expressing cell therapy generated by the modified manufacturing process to the subject;

[0181] modifying a manufacturing process of a BCMA CAR-expressing cell therapy, e.g., enriching for CD8+ Tscm (e.g., HLADR-CD95+CD27+CD8+ cells, CD45RO−CD27+CD8+ cells, or CCR7+CD45RO−CD27+CD8+ cells) prior to introducing a nucleic acid encoding a BCMA CAR, and administering the BCMA CAR-expressing cell therapy generated by the modified manufacturing process to the subject;

[0182] modifying a manufacturing process of the BCMA CAR-expressing cell therapy, e.g., increasing the proliferation of seeded cells from the subject during the manufacturing of the BCMA CAR-expressing cell therapy, and administering the BCMA CAR-expressing cell therapy generated by the modified manufacturing process to the subject; or

[0183] administering a pretreatment to the subject, wherein the pretreatment increases the ratio of the amount of CD4+ immune effector cells (e.g., CD4+ T cells) to the amount of CD8+ immune effector cells (e.g., CD8+ T cells) in the subject, e.g., in a sample from the subject (e.g., an apheresis sample (e.g., a leukapheresis sample), in a seed culture at the start of the manufacturing of a BCMA CAR-expressing cell therapy (e.g., a leukapheresis sample after monocytes are removed using elutriation)), or in the subject's peripheral blood and/or bone marrow prior to the administration of the BCMA CAR-expressing cell therapy, e.g., the pretreatment increases the ratio to greater than or equal to 1.6 (e.g., between 1.6 and 5, e.g., between 1.6 and 3.5), manufacturing the BCMA CAR-expressing cell therapy using cells (e.g., T cells) from the subject, and administering the BCMA CAR-expressing cell therapy to the subject.

[0184] In some embodiments, the value for the level or activity of CCR7+CD45RO−CD27+CD8+ cells comprises the percentage of CCR7+CD45RO−CD27+CD8+ cells among CD8+ T cells, e.g., as measured by an assay disclosed herein, e.g., flow cytometry.

[0185] In some embodiments, the method comprises:

[0186] responsive to the percentage of CCR7+CD45RO−CD27+CD8+ cells among CD8+ T cells being greater than or equal to 15% (e.g., between 15% and 90%, e.g., between 15% and 80%, e.g., between 15% and 70%, e.g., between 15% and 60%, e.g., between 15% and 50%), performing:

[0187] manufacturing a BCMA CAR-expressing cell therapy using cells (e.g., T cells) from the subject and administering the BCMA CAR-expressing cell therapy to the subject; or

[0188] administering, e.g., initiating administering or continuing administering, a BCMA CAR-expressing cell therapy to the subject.

[0189] In some embodiments, the method comprises:

[0190] responsive to the percentage of CCR7+CD45RO−CD27+CD8+ cells among CD8+ T cells being less than 15% (e.g., between 0.1% and 15%, e.g., between 0.1% and 12%, e.g., between 0.1% and 10%, e.g., between 0.1% and 8%), performing one, two, three, four, five, six, seven, or all of:

[0191] administering an altered dosing regimen of a BCMA CAR-expressing cell therapy (e.g., a dosing regimen with a higher dose and/or more frequent administration than a reference dosing regimen) to the subject;

[0192] administering a second therapy (e.g., a second therapy that is not a BCMA CAR-expressing cell therapy) to the subject;

[0193] administering a BCMA CAR-expressing cell therapy and a second therapy to the subject;

[0194] discontinuing administration of a BCMA CAR-expressing cell therapy and optionally administering a second therapy to the subject;

[0195] modifying a manufacturing process of a BCMA CAR-expressing cell therapy, e.g., enriching for CD4+ immune effector cells (e.g., CD4+ T cells) relative to CD8+ immune effector cells (CD8+ T cells) prior to introducing a nucleic acid encoding a BCMA CAR, and administering the BCMA CAR-expressing cell therapy generated by the modified manufacturing process to the subject;

[0196] modifying a manufacturing process of a BCMA CAR-expressing cell therapy, e.g., enriching for CD8+ Tscm (e.g., HLADR-CD95+CD27+CD8+ cells, CD45RO−CD27+CD8+ cells, or CCR7+CD45RO−CD27+CD8+ cells) prior to introducing a nucleic acid encoding a BCMA CAR, and administering the BCMA CAR-expressing cell therapy generated by the modified manufacturing process to the subject;

[0197] modifying a manufacturing process of the BCMA CAR-expressing cell therapy, e.g., increasing the proliferation of seeded cells from the subject during the manufacturing of the BCMA CAR-expressing cell therapy, and administering the BCMA CAR-expressing cell therapy generated by the modified manufacturing process to the subject; or

[0198] administering a pretreatment to the subject, wherein the pretreatment increases the ratio of the amount of CD4+ immune effector cells (e.g., CD4+ T cells) to the amount of CD8+ immune effector cells (e.g., CD8+ T cells) in the subject, e.g., in a sample from the subject (e.g., an apheresis sample (e.g., a leukapheresis sample), in a seed culture at the start of the manufacturing of a BCMA CAR-expressing cell therapy (e.g., a leukapheresis sample after monocytes are removed using elutriation)), or in the subject's peripheral blood and/or bone marrow prior to the administration of the BCMA CAR-expressing cell therapy, e.g., the pretreatment increases the ratio to greater than or equal to 1.6 (e.g., between 1.6 and 5, e.g., between 1.6 and 3.5), manufacturing the BCMA CAR-expressing cell therapy using cells (e.g., T cells) from the subject, and administering the BCMA CAR-expressing cell therapy to the subject.

[0199] In some embodiments, the value for the proliferation of seeded cells from the subject during manufacturing of the BCMA CAR-expressing cell therapy comprises the fold expansion of seeded cells from the subject during manufacturing (e.g., total cell counts at the end of manufacturing relative to at the start of manufacturing) of the BCMA CAR-expressing cell therapy, e.g., as measured by an assay disclosed herein, e.g., as measured by cell counting.

[0200] In one aspect, provided herein is a method of evaluating or predicting the potency of a BCMA CAR-expressing cell therapy in a subject, wherein the subject has a disease associated with the expression of BCMA and wherein the BCMA CAR-expressing cell therapy is manufactured using cells (e.g., T cells) from the subject, comprising:

[0201] acquiring a value for one, two, three, four, five, or all of:

[0202] (i) the level or activity of CD4+ immune effector cells (e.g., CD4+ T cells) relative to the level or activity of CD8+ immune effector cells (e.g., CD8+ T cells) in the subject, e.g., in a sample from the subject (e.g., an apheresis sample (e.g., a leukapheresis sample), in a seed culture at the start of the manufacturing of the BCMA CAR-expressing cell therapy (e.g., a leukapheresis sample after monocytes are removed using elutriation)), or in the subject's peripheral blood and/or bone marrow prior to the administration of the BCMA CAR-expressing cell therapy,

[0203] (ii) the level or activity of CD8+ Tscm (stem cell memory T cells) in the subject, e.g., in a sample from the subject (e.g., an apheresis sample (e.g., a leukapheresis sample) or a seed culture at the start of the manufacturing of the BCMA CAR-expressing cell therapy (e.g., a leukapheresis sample after monocytes are removed using elutriation)),

[0204] (iii) the level or activity of HLADR-CD95+CD27+CD8+ cells in the subject, e.g., in a sample from the subject (e.g., an apheresis sample (e.g., a leukapheresis sample) or a seed culture at the start of the manufacturing of the BCMA CAR-expressing cell therapy (e.g., a leukapheresis sample after monocytes are removed using elutriation)),

[0205] (iv) the level or activity of CD45RO−CD27+CD8+ cells in the subject, e.g., in a sample from the subject (e.g., an apheresis sample (e.g., a leukapheresis sample) or a seed culture at the start of the manufacturing of the BCMA CAR-expressing cell therapy (e.g., a leukapheresis sample after monocytes are removed using elutriation)),

[0206] (v) the level or activity of CCR7+CD45RO−CD27+CD8+ cells in the subject, e.g., in a sample from the subject (e.g., an apheresis sample (e.g., a leukapheresis sample) or a seed culture at the start of the manufacturing of the BCMA CAR-expressing cell therapy (e.g., a leukapheresis sample after monocytes are removed using elutriation)), or

[0207] (vi) the proliferation of seeded cells from the subject during manufacturing of the BCMA CAR-expressing cell therapy, e.g., as measured by population doublings by day 9 (PDL9), wherein:

[0208] (a) an increase in the value of one, two, three, four, five, or all of (i)-(vi), as compared to a reference value, e.g., a non-responder reference value, is indicative or predictive of increased potency of the BCMA CAR-expressing cell therapy in the subject; or

[0209] (b) a decrease in the value of one, two, three, four, five, or all of (i)-(vi), as compared to a reference value, e.g., a responder reference value, is indicative or predictive of decreased potency of the BCMA CAR-expressing cell therapy in the subject,

[0210] thereby evaluating or predicting the potency of the BCMA CAR-expressing cell therapy.

[0211] In some embodiments, the method comprises acquiring a value for the level or activity of CD4+ immune effector cells (e.g., CD4+ T cells) relative to the level or activity of CD8+ immune effector cells (e.g., CD8+ T cells) in the subject, e.g., in a sample from the subject (e.g., an apheresis sample (e.g., a leukapheresis sample), in a seed culture at the start of the manufacturing of the BCMA CAR-expressing cell therapy (e.g., a leukapheresis sample after monocytes are removed using elutriation)), or in the subject's peripheral blood and/or bone marrow prior to the administration of the BCMA CAR-expressing cell therapy. In some embodiments, the method comprises acquiring a value for the level or activity of CD8+ Tscm (stem cell memory T cells) in the subject, e.g., in a sample from the subject (e.g., an apheresis sample (e.g., a leukapheresis sample) or a seed culture at the start of the manufacturing of the BCMA CAR-expressing cell therapy (e.g., a leukapheresis sample after monocytes are removed using elutriation)). In some embodiments, the method comprises acquiring a value for the level or activity of HLADR-CD95+CD27+CD8+ cells in the subject, e.g., in a sample from the subject (e.g., an apheresis sample (e.g., a leukapheresis sample) or a seed culture at the start of the manufacturing of the BCMA CAR-expressing cell therapy (e.g., a leukapheresis sample after monocytes are removed using elutriation)). In some embodiments, the method comprises acquiring a value for the level or activity of CD45RO−CD27+CD8+ cells in the subject, e.g., in a sample from the subject (e.g., an apheresis sample (e.g., a leukapheresis sample) or a seed culture at the start of the manufacturing of the BCMA CAR-expressing cell therapy (e.g., a leukapheresis sample after monocytes are removed using elutriation)). In some embodiments, the method comprises acquiring a value for the level or activity of CCR7+CD45RO−CD27+CD8+ cells in the subject, e.g., in a sample from the subject (e.g., an apheresis sample (e.g., a leukapheresis sample) or a seed culture at the start of the manufacturing of the BCMA CAR-expressing cell therapy (e.g., a leukapheresis sample after monocytes are removed using elutriation)). In some embodiments, the method comprises acquiring a value for the proliferation of seeded cells from the subject during manufacturing of the BCMA CAR-expressing cell therapy, e.g., population doublings by day 9 (PDL9).

[0212] In some embodiments, the increase in the value of one, two, three, four, five, or all of (i)-(vi), as compared to a reference value, e.g., a non-responder reference value, is indicative or predictive of increased expansion of the BCMA CAR-expressing cell therapy in the subject, e.g., as measured by an assay disclosed herein, e.g., as measured by the copy number of CAR transgenes per μg DNA using qPCR.

[0213] In some embodiments, the decrease in the value of one, two, three, four, five, or all of (i)-(vi), as compared to a reference value, e.g., a responder reference value, is indicative or predictive of decreased expansion of the BCMA CAR-expressing cell therapy in the subject, e.g., as measured by an assay disclosed herein, e.g., as measured by the copy number of CAR transgenes per μg DNA using qPCR.

[0214] In one aspect, disclosed herein is a method of manufacturing a BCMA CAR-expressing cell therapy, wherein the BCMA CAR-expressing cell therapy is manufactured using cells (e.g., T cells) from a subject, comprising:

[0215] acquiring a value for one, two, three, four, five, or all of:

[0216] (i) the level or activity of CD4+ immune effector cells (e.g., CD4+ T cells) relative to the level or activity of CD8+ immune effector cells (e.g., CD8+ T cells) in the subject, e.g., in a sample from the subject (e.g., an apheresis sample (e.g., a leukapheresis sample), in a seed culture at the start of the manufacturing of the BCMA CAR-expressing cell therapy (e.g., a leukapheresis sample after monocytes are removed using elutriation)), or in the subject's peripheral blood and/or bone marrow prior to the administration of the BCMA CAR-expressing cell therapy,

[0217] (ii) the level or activity of CD8+ Tscm (stem cell memory T cells) in the subject, e.g., in a sample from the subject (e.g., an apheresis sample (e.g., a leukapheresis sample) or a seed culture at the start of the manufacturing of the BCMA CAR-expressing cell therapy (e.g., a leukapheresis sample after monocytes are removed using elutriation)),

[0218] (iii) the level or activity of HLADR-CD95+CD27+CD8+ cells in the subject, e.g., in a sample from the subject (e.g., an apheresis sample (e.g., a leukapheresis sample) or a seed culture at the start of the manufacturing of the BCMA CAR-expressing cell therapy (e.g., a leukapheresis sample after monocytes are removed using elutriation)),

[0219] (iv) the level or activity of CD45RO−CD27+CD8+ cells in the subject, e.g., in a sample from the subject (e.g., an apheresis sample (e.g., a leukapheresis sample) or a seed culture at the start of the manufacturing of the BCMA CAR-expressing cell therapy (e.g., a leukapheresis sample after monocytes are removed using elutriation)),

[0220] (v) the level or activity of CCR7+CD45RO−CD27+CD8+ cells in the subject, e.g., in a sample from the subject (e.g., an apheresis sample (e.g., a leukapheresis sample) or a seed culture at the start of the manufacturing of the BCMA CAR-expressing cell therapy (e.g., a leukapheresis sample after monocytes are removed using elutriation)), or

[0221] (vi) the proliferation of seeded cells from the subject during manufacturing of the BCMA CAR-expressing cell therapy, e.g., as measured by population doublings by day 9 (PDL9), wherein: responsive to an increase in the value of one, two, three, four, five, or all of (i)-(vi), as compared to a reference value, e.g., a non-responder reference value, manufacturing the BCMA CAR-expressing cell therapy using cells from the subject.

[0222] In some embodiments, the method comprises acquiring a value for the level or activity of CD4+ immune effector cells (e.g., CD4+ T cells) relative to the level or activity of CD8+ immune effector cells (e.g., CD8+ T cells) in the subject, e.g., in a sample from the subject (e.g., an apheresis sample (e.g., a leukapheresis sample), in a seed culture at the start of the manufacturing of the BCMA CAR-expressing cell therapy (e.g., a leukapheresis sample after monocytes are removed using elutriation)), or in the subject's peripheral blood and/or bone marrow prior to the administration of the BCMA CAR-expressing cell therapy. In some embodiments, the method comprises acquiring a value for the level or activity of CD8+ Tscm (stem cell memory T cells) in the subject, e.g., in a sample from the subject (e.g., an apheresis sample (e.g., a leukapheresis sample) or a seed culture at the start of the manufacturing of the BCMA CAR-expressing cell therapy (e.g., a leukapheresis sample after monocytes are removed using elutriation)). In some embodiments, the method comprises acquiring a value for the level or activity of HLADR-CD95+CD27+CD8+ cells in the subject, e.g., in a sample from the subject (e.g., an apheresis sample (e.g., a leukapheresis sample) or a seed culture at the start of the manufacturing of the BCMA CAR-expressing cell therapy (e.g., a leukapheresis sample after monocytes are removed using elutriation)). In some embodiments, the method comprises acquiring a value for the level or activity of CD45RO−CD27+CD8+ cells in the subject, e.g., in a sample from the subject (e.g., an apheresis sample (e.g., a leukapheresis sample) or a seed culture at the start of the manufacturing of the BCMA CAR-expressing cell therapy (e.g., a leukapheresis sample after monocytes are removed using elutriation)). In some embodiments, the method comprises acquiring a value for the level or activity of CCR7+CD45RO−CD27+CD8+ cells in the subject, e.g., in a sample from the subject (e.g., an apheresis sample (e.g., a leukapheresis sample) or a seed culture at the start of the manufacturing of the BCMA CAR-expressing cell therapy (e.g., a leukapheresis sample after monocytes are removed using elutriation)). In some embodiments, the method comprises acquiring a value for the proliferation of seeded cells from the subject during manufacturing of the BCMA CAR-expressing cell therapy, e.g., population doublings by day 9 (PDL9).

[0223] In one aspect, provided herein is a method of manufacturing a BCMA CAR-expressing cell therapy, wherein the BCMA CAR-expressing cell therapy is manufactured using cells (e.g., T cells) from a subject, comprising:

[0224] acquiring a value for one, two, three, four, five, or all of:

[0225] (i) the level or activity of CD4+ immune effector cells (e.g., CD4+ T cells) relative to the level or activity of CD8+ immune effector cells (e.g., CD8+ T cells) in the subject, e.g., in a sample from the subject (e.g., an apheresis sample (e.g., a leukapheresis sample), in a seed culture at the start of the manufacturing of the BCMA CAR-expressing cell therapy (e.g., a leukapheresis sample after monocytes are removed using elutriation)), or in the subject's peripheral blood and/or bone marrow prior to the administration of the BCMA CAR-expressing cell therapy,

[0226] (ii) the level or activity of CD8+ Tscm (stem cell memory T cells) in the subject, e.g., in a sample from the subject (e.g., an apheresis sample (e.g., a leukapheresis sample) or a seed culture at the start of the manufacturing of the BCMA CAR-expressing cell therapy (e.g., a leukapheresis sample after monocytes are removed using elutriation)),

[0227] (iii) the level or activity of HLADR-CD95+CD27+CD8+ cells in the subject, e.g., in a sample from the subject (e.g., an apheresis sample (e.g., a leukapheresis sample) or a seed culture at the start of the manufacturing of the BCMA CAR-expressing cell therapy (e.g., a leukapheresis sample after monocytes are removed using elutriation)),

[0228] (iv) the level or activity of CD45RO−CD27+CD8+ cells in the subject, e.g., in a sample from the subject (e.g., an apheresis sample (e.g., a leukapheresis sample) or a seed culture at the start of the manufacturing of the BCMA CAR-expressing cell therapy (e.g., a leukapheresis sample after monocytes are removed using elutriation)),

[0229] (v) the level or activity of CCR7+CD45RO−CD27+CD8+ cells in the subject, e.g., in a sample from the subject (e.g., an apheresis sample (e.g., a leukapheresis sample) or a seed culture at the start of the manufacturing of the BCMA CAR-expressing cell therapy (e.g., a leukapheresis sample after monocytes are removed using elutriation)), or

[0230] (vi) the proliferation of seeded cells from the subject during manufacturing of the BCMA CAR-expressing cell therapy, e.g., as measured by population doublings by day 9 (PDL9), wherein:

[0231] responsive to a decrease in the value of one, two, three, four, five, or all of (i)-(vi), as compared to a reference value, e.g., a responder reference value, performing one, two, three, or all of:

[0232] modifying a manufacturing process of the BCMA CAR-expressing cell therapy, e.g., enriching for CD4+ immune effector cells (e.g., CD4+ T cells) relative to CD8+ immune effector cells (CD8+ T cells) prior to introducing a nucleic acid encoding a BCMA CAR;

[0233] modifying a manufacturing process of the BCMA CAR-expressing cell therapy, e.g., enriching for CD8+ Tscm (e.g., HLADR-CD95+CD27+CD8+ cells, CD45RO−CD27+CD8+ cells, or CCR7+CD45RO−CD27+CD8+ cells) prior to introducing a nucleic acid encoding a BCMA CAR;

[0234] modifying a manufacturing process of the BCMA CAR-expressing cell therapy, e.g., increasing the proliferation of seeded cells from the subject during the manufacturing of the BCMA CAR-expressing cell therapy; or

[0235] administering a pretreatment to the subject, wherein the pretreatment increases the ratio of the amount of CD4+ immune effector cells (e.g., CD4+ T cells) to the amount of CD8+ immune effector cells (e.g., CD8+ T cells) in the subject, e.g., in a sample from the subject (e.g., an apheresis sample (e.g., a leukapheresis sample), in a seed culture at the start of the manufacturing of the BCMA CAR-expressing cell therapy (e.g., a leukapheresis sample after monocytes are removed using elutriation)), or in the subject's peripheral blood and/or bone marrow prior to the administration of the BCMA CAR-expressing cell therapy, e.g., the pretreatment increases the ratio to greater than or equal to 1.6 (e.g., between 1.6 and 5, e.g., between 1.6 and 3.5), and manufacturing the BCMA CAR-expressing cell therapy using cells (e.g., T cells) from the subject.

[0236] In some embodiments, the method comprises acquiring a value for the level or activity of CD4+ immune effector cells (e.g., CD4+ T cells) relative to the level or activity of CD8+ immune effector cells (e.g., CD8+ T cells) in the subject, e.g., in a sample from the subject (e.g., an apheresis sample (e.g., a leukapheresis sample), in a seed culture at the start of the manufacturing of the BCMA CAR-expressing cell therapy (e.g., a leukapheresis sample after monocytes are removed using elutriation)), or in the subject's peripheral blood and/or bone marrow prior to the administration of the BCMA CAR-expressing cell therapy. In some embodiments, the method comprises acquiring a value for the level or activity of CD8+ Tscm (stem cell memory T cells) in the subject, e.g., in a sample from the subject (e.g., an apheresis sample (e.g., a leukapheresis sample) or a seed culture at the start of the manufacturing of the BCMA CAR-expressing cell therapy (e.g., a leukapheresis sample after monocytes are removed using elutriation)). In some embodiments, the method comprises acquiring a value for the level or activity of HLADR-CD95+CD27+CD8+ cells in the subject, e.g., in a sample from the subject (e.g., an apheresis sample (e.g., a leukapheresis sample) or a seed culture at the start of the manufacturing of the BCMA CAR-expressing cell therapy (e.g., a leukapheresis sample after monocytes are removed using elutriation)). In some embodiments, the method comprises acquiring a value for the level or activity of CD45RO−CD27+CD8+ cells in the subject, e.g., in a sample from the subject (e.g., an apheresis sample (e.g., a leukapheresis sample) or a seed culture at the start of the manufacturing of the BCMA CAR-expressing cell therapy (e.g., a leukapheresis sample after monocytes are removed using elutriation)). In some embodiments, the method comprises acquiring a value for the level or activity of CCR7+CD45RO−CD27+CD8+ cells in the subject, e.g., in a sample from the subject (e.g., an apheresis sample (e.g., a leukapheresis sample) or a seed culture at the start of the manufacturing of the BCMA CAR-expressing cell therapy (e.g., a leukapheresis sample after monocytes are removed using elutriation)). In some embodiments, the method comprises acquiring a value for the proliferation of seeded cells from the subject during manufacturing of the BCMA CAR-expressing cell therapy, e.g., population doublings by day 9 (PDL9).

[0237] In some embodiments, the value for the level or activity of CD4+ immune effector cells (e.g., CD4+ T cells) relative to the level or activity of CD8+ immune effector cells (e.g., CD8+ T cells) comprises a ratio of the amount of CD4+ immune effector cells (e.g., CD4+ T cells) to the amount of CD8+ immune effector cells (e.g., CD8+ T cells), e.g., as measured by an assay disclosed herein, e.g., flow cytometry.

[0238] In some embodiments, the value for the level or activity of CD8+ Tscm (stem cell memory T cells) comprises the percentage of CD8+ Tscm (stem cell memory T cells) among CD8+ T cells, e.g., as measured by an assay disclosed herein, e.g., flow cytometry.

[0239] In some embodiments, the value for the level or activity of HLADR-CD95+CD27+CD8+ cells comprises the percentage of HLADR-CD95+CD27+CD8+ cells among CD8+ T cells, e.g., as measured by an assay disclosed herein, e.g., flow cytometry.

[0240] In some embodiments, the value for the level or activity of CD45RO−CD27+CD8+ cells comprises the percentage of CD45RO−CD27+CD8+ cells among CD8+ T cells, e.g., as measured by an assay disclosed herein, e.g., flow cytometry.

[0241] In some embodiments, the value for the level or activity of CCR7+CD45RO−CD27+CD8+ cells comprises the percentage of CCR7+CD45RO−CD27+CD8+ cells among CD8+ T cells, e.g., as measured by an assay disclosed herein, e.g., flow cytometry.

[0242] In some embodiments, the value for the proliferation of seeded cells from the subject during manufacturing of the BCMA CAR-expressing cell therapy comprises the fold expansion of seeded cells from the subject during manufacturing (e.g., total cell counts at the end of manufacturing relative to at the start of manufacturing) of the BCMA CAR-expressing cell therapy, e.g., as measured by an assay disclosed herein, e.g., as measured by cell counting.

[0243] In certain embodiments of the foregoing aspects, the method comprises administering the BCMA CAR-expressing cell therapy to the subject in combination with one, two, or all of:

[0244] (1) an agent that increases the efficacy of the cell comprising the CAR nucleic acid or CAR polypeptide;

[0245] (2) an agent that ameliorates one or more side effects associated with administration of the cell comprising the CAR nucleic acid or CAR polypeptide;

[0246] (3) an agent that treats the disease associated with the expression of BCMA.

[0247] In certain embodiments of the foregoing aspects, the method comprises administering the BCMA CAR-expressing cell therapy to the subject in combination with a compound of Formula (I) (COF1), wherein the COF1 is:

[chemical structure]

or a pharmaceutically acceptable salt, ester, hydrate, solvate, or tautomer thereof, wherein:

[0248] X is O or S;

[0249] R¹ is C₁-C₆ alkyl, C₂-C₆ alkenyl, C₂-C₆ alkynyl, C₁-C₆ heteroalkyl, carbocyclyl, heterocyclyl, aryl, or heteroaryl, each of which is optionally substituted by one or more R⁴;

[0250] each of R^{2a} and R^{2b} is independently hydrogen or C₁-C₆ alkyl; or R^{2a} and R^{2b} together with the carbon atom to which they are attached form a carbonyl group or a thiocarbonyl group;

[0251] each of R³ is independently C₁-C₆ alkyl, C₂-C₆ alkenyl, C₂-C₆ alkynyl, C₁-C₆ heteroalkyl, halo, cyano, —C(O)R^{A}, —C(O)OR^{B}, —OR^{B}, —N(R^{C})(R^{D}), —C(O)N(R^{C})(R^{D}), —N(R^{C})C(O)R^{A}, —S(O)ₓ(R^{E}, —S(O)ₓN(R^{C})(R^{D}), or —N(R^{C})S(O)ₓR^{E}, wherein each alkyl, alkenyl, alkynyl, and heteroalkyl is independently and optionally substituted with one or more R⁶;

[0252] each R⁴ is independently C₁-C₆ alkyl, C₂-C₆ alkenyl, C₂-C₆ alkynyl, C₁-C₆ heteroalkyl, halo, cyano, oxo, —C(O)R^{A}, —C(O)OR^{B}, —OR^{B}, —N(R^{C})(R^{D}), —C(O)N(R^{C})(R^{D}), —N(R^{C})C(O)R^{A}, —S(O)ₓR^{E}, —S(O)ₓN(R^{C})(R^{D}), —N(R^{C})S(O)ₓR^{E}, carbocyclyl, heterocyclyl, aryl, or heteroaryl, wherein each alkyl, alkenyl, alkynyl, heteroalkyl, carbocyclyl, heterocyclyl, aryl, and heteroaryl is independently and optionally substituted with one or more R⁷;

[0253] each of R^{A}, R^{B}, R^{C}, R^{D}, and R^{E} is independently hydrogen or C₁-C₆ alkyl;

[0254] each R⁶ is independently C₁-C₆ alkyl, oxo, cyano, —OR^{B}, —N(R^{C})(R^{D}), —C(O)N(R^{C})(R^{D}), —N(R^{C})C(O)R^{A}, aryl, or heteroaryl, wherein each aryl and heteroaryl is independently and optionally substituted with one or more R⁸;

[0255] each R⁷ is independently halo, oxo, cyano, —OR^{B}, —N(R^{C})(R^{D}), —C(O)N(R^{C})(R^{D}), or —N(R^{C})C(O)R^{A};

[0256] each R⁸ is independently C₁-C₆ alkyl, cyano, —OR^{B}, —N(R^{C})(R^{D}), —C(O)N(R^{C})(R^{D}), or —N(R^{C})C(O)R^{A};

[0257] n is 0, 1, 2, 3 or 4; and

[0258] x is 0, 1, or 2, optionally wherein:

[0259] (1) the COF1 is an immunomodulatory imide drug (IMiD), or a pharmaceutically acceptable salt thereof;

[0260] (2) the COF1 is selected from the group consisting of lenalidomide, pomalidomide, thalidomide, and 2-(4-(tert-butyl)phenyl)-N-((2-(2,6-dioxopiperidin-3-yl)-1-oxoisoindolin-5-yl)methyl)acetamide, or a pharmaceutically acceptable salt thereof;

[0261] (3) the COF1 is selected from the group consisting of:

[chemical structure]

or a pharmaceutically acceptable salt thereof; or

[0262] (4) the COF1 is lenalidomide, or a pharmaceutically acceptable salt thereof.

[0263] In certain embodiments of the foregoing aspects, the method comprises administering the BCMA CAR-expressing cell therapy to the subject in combination with a kinase inhibitor, e.g., a BTK inhibitor, e.g., ibrutinib.

[0264] In certain embodiments of the foregoing aspects, the method comprises administering the BCMA CAR-expressing cell therapy to the subject in combination with a second CAR-expressing cell therapy.

[0265] In some embodiments, the second CAR-expressing cell therapy is a CD19 CAR-expressing cell therapy, e.g., a CD19 CAR-expressing cell therapy disclosed herein, e.g., CTL119 or CTL019. In some embodiments, the CD19 CAR-expressing cell therapy is administered after the administration of the BCMA CAR-expressing cell therapy, e.g., after CD19 expression is increased in the subject following the administration of the BCMA CAR-expressing cell therapy. In some embodiments, the CD19 CAR-expressing cell therapy comprises a cell (e.g., a population of cells) expressing a CD19 CAR. In some embodiments, the CD19 CAR comprises an amino acid sequence disclosed in Table 8, 9, or 10 (e.g., a CDR, scFv, or full-length amino acid sequence disclosed in Table 8, 9, or 10), or a sequence at least about 85%, 90%, 95%, 99% or more identical thereto, and/or having one, two, three or more substitutions, insertions or deletions, e.g., conserved substitutions.

[0266] In some embodiments, the second CAR-expressing cell therapy is a CD20 CAR-expressing cell therapy, e.g., a CD20 CAR-expressing cell therapy disclosed herein. In some embodiments, the CD20 CAR-expressing cell therapy is administered after the administration of the BCMA CAR-expressing cell therapy, e.g., after CD20 expression is increased in the subject following the administration of the BCMA CAR-expressing cell therapy. In some embodiments, the CD20 CAR-expressing cell therapy comprises a cell (e.g., a population of cells) expressing a CD20 CAR. In some embodiments, the CD20 CAR comprises an amino acid sequence disclosed in Table 11, 12, or 13 (e.g., a CDR, scFv, or full-length amino acid sequence disclosed in Table 11, 12, or 13), or a sequence at least about 85%, 90%, 95%, 99% or more identical thereto, and/or having one, two, three or more substitutions, insertions or deletions, e.g., conserved substitutions.

[0267] In some embodiments, the second CAR-expressing cell therapy is a CD22 CAR-expressing cell therapy, e.g., a CD22 CAR-expressing cell therapy disclosed herein. In some embodiments, the CD22 CAR-expressing cell therapy is administered after the administration of the BCMA CAR-expressing cell therapy, e.g., after CD22 expression is increased in the subject following the administration of the BCMA CAR-expressing cell therapy. In some embodiments, the CD22 CAR-expressing cell therapy comprises a cell (e.g., a population of cells) expressing a CD22 CAR. In some embodiments, the CD22 CAR comprises an amino acid sequence disclosed in Table 14 or 15 (e.g., a CDR, scFv, or full-length amino acid sequence disclosed in Table 14 or 15), or a sequence at least about 85%, 90%, 95%, 99% or more identical thereto, and/or having one, two, three or more substitutions, insertions or deletions, e.g., conserved substitutions.

[0268] In some embodiments, the second CAR-expressing cell therapy is a CAR-expressing cell therapy comprising a cell expressing a first CAR and a second CAR, wherein the first CAR is a BCMA CAR (e.g., a BCMA CAR disclosed herein). In some embodiments, the second CAR is selected from the group consisting of a CD19 CAR (e.g., a CD19 CAR disclosed herein), a CD20 CAR (e.g., a CD20 CAR disclosed herein), and a CD22 CAR (e.g., a CD22 CAR disclosed herein). In some embodiments, the second CAR is a CD19 CAR (e.g., a CD19 CAR disclosed herein). In some embodiments, the CD19 CAR-expressing cell therapy comprises a cell (e.g., a population of cells) expressing a CD19 CAR. In some embodiments, the CD19 CAR comprises an amino acid sequence disclosed in Table 8, 9, or 10 (e.g., a CDR, scFv, or full-length amino acid sequence disclosed in Table 8, 9, or 10), or a sequence at least about 85%, 90%, 95%, 99% or more identical thereto, and/or having one, two, three or more substitutions, insertions or deletions, e.g., conserved substitutions. In some embodiments, the second CAR is a CD20 CAR (e.g., a CD20 CAR disclosed herein). In some embodiments, the CD20 CAR comprises an amino acid sequence disclosed in Table 11, 12, or 13 (e.g., a CDR, scFv, or full-length amino acid sequence disclosed in Table 11, 12, or 13), or a sequence at least about 85%, 90%, 95%, 99% or more identical thereto, and/or having one, two, three or more substitutions, insertions or deletions, e.g., conserved substitutions. In some embodiments, the second CAR is a CD22 CAR (e.g., a CD22 CAR disclosed herein). In some embodiments, the CD22 CAR comprises an amino acid sequence disclosed in Table 14 or 15 (e.g., a CDR, scFv, or full-length amino acid sequence disclosed in Table 14 or 15), or a sequence at least about 85%, 90%, 95%, 99% or more identical thereto, and/or having one, two, three or more substitutions, insertions or deletions, e.g., conserved substitutions.

[0269] In some embodiments, the second CAR-expressing cell therapy is a CAR-expressing cell therapy comprising a cell expressing a multispecific CAR, e.g., a bispecific CAR, that binds to a first antigen and a second antigen, wherein the first antigen is BCMA. In some embodiments, the second antigen is selected from the group consisting of CD19, CD20, and CD22. In some embodiments, the second antigen is CD19. In some embodiments, the second antigen is CD20. In some embodiments, the second antigen is CD22.

[0270] In certain embodiments of the foregoing aspects, the method comprises administering the BCMA CAR-expressing cell therapy to the subject in combination with a CD19 inhibitor, e.g., a CD19 inhibitor disclosed herein. In some embodiments, the CD19 inhibitor is administered after the administration of the BCMA CAR-expressing cell therapy, e.g., after CD19 expression is increased in the subject following the administration of the BCMA CAR-expressing cell therapy.

[0271] In certain embodiments of the foregoing aspects, the method comprises administering the BCMA CAR-expressing cell therapy to the subject in combination with a CD20 inhibitor, e.g., a CD20 inhibitor disclosed herein. In some embodiments, the CD20 inhibitor is a multispecific antibody molecule, e.g., a bispecific antibody molecule, that binds to CD20 and CD3, e.g., THG338. In some embodiments, the CD20 inhibitor is administered after the administration of the BCMA CAR-expressing cell therapy, e.g., after CD20 expression is increased in the subject following the administration of the BCMA CAR-expressing cell therapy.

[0272] In certain embodiments of the foregoing aspects, the method comprises administering the BCMA CAR-expressing cell therapy to the subject in combination with a CD22 inhibitor, e.g., a CD22 inhibitor disclosed herein. In some embodiments, the CD22 inhibitor is administered after the administration of the BCMA CAR-expressing cell therapy, e.g., after CD22 expression is increased in the subject following the administration of the BCMA CAR-expressing cell therapy.

[0273] In certain embodiments of the foregoing aspects, the method comprises administering the BCMA CAR-expressing cell therapy to the subject in combination with a molecule that binds to Fc receptor like 2 (FCRL2) or Fc receptor like 5 (FCRL5). In some embodiments, the molecule is a CAR-expressing cell therapy comprising a cell expressing a CAR that binds to FCRL2 or FCRL5. In some embodiments, the molecule is a multispecific antibody molecule, e.g., a bispecific antibody molecule, that binds to a first antigen and a second antigen, wherein the first antigen is FCRL2 or FCRL5, optionally wherein the second antigen is CD3.

[0274] In certain embodiments of the foregoing aspects, the method comprises administering the BCMA CAR-expressing cell therapy to the subject in combination with an interleukin-15 (IL-15) polypeptide, an interleukin-15 receptor alpha (IL-15Ra) polypeptide, or a combination of both an IL-15 polypeptide and an IL-15Ra polypeptide, e.g., hetIL-15.

[0275] In certain embodiments of the foregoing aspects, the method comprises administering the BCMA CAR-expressing cell therapy to the subject in combination with an inhibitor of TGF beta.

[0276] In certain embodiments of the foregoing aspects, the method comprises administering the BCMA CAR-expressing cell therapy to the subject in combination with an EGFR inhibitor, e.g., an EGFR^{mut}-tyrosine kinase inhibitor (TKI). In some embodiments, the EGFR inhibitor is EGF816. In some embodiments, the EGFR inhibitor is (R,E)-N-(7-chloro-1-(1-(4-(dimethylamino)but-2-enoyl)azepan-3-yl)-1H-benzo[d]imidazol-2-yl)-2-methylisonicotinamide. In some embodiments, the EGFR inhibitor is compound A40 disclosed in Table 27.

[0277] In certain embodiments of the foregoing aspects, the method comprises administering the BCMA CAR-expressing cell therapy to the subject in combination with an adenosine A2AR antagonist. In some embodiments, the adenosine A2AR antagonist is selected from the group consisting of PBF509, CPI444, AZD4635, Vipadenant, GBV-2034, and AB928. In some embodiments, the adenosine A2AR antagonist is selected from the group consisting of 5-bromo-2,6-di-(1H-pyrazol-1-yl)pyrimidine-4-amine; (S)-7-(5-methylfuran-2-yl)-3-((6-(((tetrahydrofuran-3-yl)oxy)methyl)pyridin-2-yl)methyl)-3H-[1,2,3]triazolo[4,5-d]pyrimidin-5-amine; (R)-7-(5-methylfuran-2-yl)-3-((6-(((tetrahydrofuran-3-yl)oxy)methyl)pyridin-2-yl)methyl)-3H-[1,2,3]triazolo[4,5-d]pyrimidin-5-amine, or racemate thereof; 7-(5-methylfuran-2-yl)-3-((6-(((tetrahydrofuran-3-yl)oxy)methyl)pyridin-2-yl)methyl)-3H-[1,2,3]triazolo[4,5-d]pyrimidin-5-amine; and 6-(2-chloro-6-methylpyridin-4-yl)-5-(4-fluorophenyl)-1,2,4-triazin-3-amine

[0278] In certain embodiments of the foregoing aspects, the method comprises administering the BCMA CAR-expressing cell therapy to the subject in combination with an anti-CD73 antibody molecule, e.g., an anti-CD73 antibody molecule disclosed herein.

[0279] In certain embodiments of the foregoing aspects, the method comprises administering the BCMA CAR-expressing cell therapy to the subject in combination with a check point inhibitor. In some embodiments, the check point inhibitor is a PD-1 inhibitor. In some embodiments, the PD-1 inhibitor is selected from the group consisting of PDR001, Nivolumab, Pembrolizumab, Pidilizumab, MEDI0680, REGN2810, TSR-042, PF-06801591, and AMP-224. In some embodiments, the PD-1 inhibitor increases expansion of BCMA CAR-expressing cells in the subject, e.g. for at least 1, 2, 3, 4, or 5 weeks, e.g., for at least, 1, 2, 3, 4, 5, 10, 15, 20, 25, or 30-fold. In some embodiments, the BCMA CAR-expressing cells are administered to the subject prior to the administration of the PD-1 inhibitor. In some embodiments, the BCMA CAR-expressing cells do not expand or have minimal expansion (e.g., no more than 1, 2, 3, 4, 5, or 10-fold expansion) in the subject at the time the PD-1 inhibitor is administered. In some embodiments, the check point inhibitor is a PD-L1 inhibitor. In some embodiments, the PD-L1 inhibitor is selected from the group consisting of FAZ053, Atezolizumab, Avelumab, Durvalumab, and BMS-936559. In some embodiments, the PD-L1 inhibitor increases expansion of BCMA CAR-expressing cells in the subject, e.g. for at least 1, 2, 3, 4, or 5 weeks, e.g., for at least, 1, 2, 3, 4, 5, 10, 15, 20, 25, or 30-fold. In some embodiments, the BCMA CAR-expressing cells are administered to the subject prior to the administration of the PD-L1 inhibitor. In some embodiments, the BCMA CAR-expressing cells do not expand or have minimal expansion (e.g., no more than 1, 2, 3, 4, 5, or 10-fold expansion) in the subject at the time the PD-L1 inhibitor is administered. In some embodiments, the check point inhibitor is a LAG-3 inhibitor. In some embodiments, the LAG-3 inhibitor is selected from the group consisting of LAG525, BMS-986016, TSR-033, MK-4280 and REGN3767. In some embodiments, the check point inhibitor is a TIM-3 inhibitor. In some embodiments, the TIM-3 inhibitor is selected from the group consisting of MGB453, TSR-022, and LY3321367.

[0280] In certain embodiments of the foregoing aspects, the method comprises administering the BCMA CAR-expressing cell therapy to the subject in combination with an antibody molecule that binds to CD32B.

[0281] In certain embodiments of the foregoing aspects, the method comprises administering the BCMA CAR-expressing cell therapy to the subject in combination with an antibody molecule that binds to IL-17, e.g., an antagonistic antibody molecule that binds to IL-17, e.g., CJM112.

[0282] In certain embodiments of the foregoing aspects, the method comprises administering the BCMA CAR-expressing cell therapy to the subject in combination with an antibody molecule that binds to IL-1 beta.

[0283] In certain embodiments of the foregoing aspects, the method comprises administering the BCMA CAR-expressing cell therapy to the subject in combination with an inhibitor of indoleamine 2,3-dioxygenase (IDO) and/or tryptophan 2,3-dioxygenase (TDO), e.g., an IDO1 inhibitor. In some embodiments, the inhibitor of IDO and/or TDO is INCB24360, indoximod, NLG919, epacadostat, NLG919, or F001287. In some embodiments, the inhibitor of IDO and/or TDO is (4E)-4-[(3-chloro-4-fluoroanilino)-nitrosomethylidene]-1,2,5-oxadiazol-3-amine, 1-methyl-D-tryptophan, α-cyclohexyl-5H-Imidazo[5,1-a]isoindole-5-ethanol, or the D isomer of 1-methyl-tryptophan.

[0284] In one aspect, disclosed herein is a method of treating a subject having a disease associated with the expression of BCMA, comprising administering a BCMA CAR-expressing cell therapy and a second therapy to the subject. In some embodiments, the second therapy is a CD19 CAR-expressing cell therapy, e.g., a CD19 CAR-expressing cell therapy disclosed herein, e.g., CTL119 or CTL019. In some embodiments, the CD19 CAR-expressing cell therapy is administered after the administration of the BCMA CAR-expressing cell therapy, e.g., after CD19 expression is increased in the subject following the administration of the BCMA CAR-expressing cell therapy. In some embodiments, the CD19 CAR-expressing cell therapy comprises a cell (e.g., a population of cells) expressing a CD19 CAR. In some embodiments, the CD19 CAR comprises an amino acid sequence disclosed in Table 8, 9, or 10 (e.g., a CDR, scFv, or full-length amino acid sequence disclosed in Table 8, 9, or 10), or a sequence at least about 85%, 90%, 95%, 99% or more identical thereto, and/or having one, two, three or more substitutions, insertions or deletions, e.g., conserved substitutions.

[0285] In some embodiments, the second therapy is a CD20 CAR-expressing cell therapy, e.g., a CD20 CAR-expressing cell therapy disclosed herein. In some embodiments, the CD20 CAR-expressing cell therapy is administered after the administration of the BCMA CAR-expressing cell therapy, e.g., after CD20 expression is increased in the subject following the administration of the BCMA CAR-expressing cell therapy. In some embodiments, the CD20 CAR-expressing cell therapy comprises a cell (e.g., a population of cells) expressing a CD20 CAR. In some embodiments, the CD20 CAR comprises an amino acid sequence disclosed in Table 11, 12, or 13 (e.g., a CDR, scFv, or full-length amino acid sequence disclosed in Table 11, 12, or 13), or a sequence at least about 85%, 90%, 95%, 99% or more identical thereto, and/or having one, two, three or more substitutions, insertions or deletions, e.g., conserved substitutions.

[0286] In some embodiments, the second therapy is a CD22 CAR-expressing cell therapy, e.g., a CD22 CAR-expressing cell therapy disclosed herein. In some embodiments, the CD22 CAR-expressing cell therapy is administered after the administration of the BCMA CAR-expressing cell therapy, e.g., after CD22 expression is increased in the subject following the administration of the BCMA CAR-expressing cell therapy. In some embodiments, the CD22 CAR-expressing cell therapy comprises a cell (e.g., a population of cells) expressing a CD22 CAR. In some embodiments, the CD22 CAR comprises an amino acid sequence disclosed in Table 14 or 15 (e.g., a CDR, scFv, or full-length amino acid sequence disclosed in Table 14 or 15), or a sequence at least about 85%, 90%, 95%, 99% or more identical thereto, and/or having one, two, three or more substitutions, insertions or deletions, e.g., conserved substitutions.

[0287] In some embodiments, the second therapy is a CAR-expressing cell therapy comprising a cell expressing a first CAR and a second CAR, wherein the first CAR is a BCMA CAR (e.g., a BCMA CAR disclosed herein). In some embodiments, the second CAR is selected from the group consisting of a CD19 CAR (e.g., a CD19 CAR disclosed herein), a CD20 CAR (e.g., a CD20 CAR disclosed herein), and a CD22 CAR (e.g., a CD22 CAR disclosed herein). In some embodiments, the second CAR is a CD19 CAR (e.g., a CD19 CAR disclosed herein). In some embodiments, the CD19 CAR-expressing cell therapy comprises a cell (e.g., a population of cells) expressing a CD19 CAR. In some embodiments, the CD19 CAR comprises an amino acid sequence disclosed in Table 8, 9, or 10 (e.g., a CDR, scFv, or full-length amino acid sequence disclosed in Table 8, 9, or 10), or a sequence at least about 85%, 90%, 95%, 99% or more identical thereto, and/or having one, two, three or more substitutions, insertions or deletions, e.g., conserved substitutions. In some embodiments, the second CAR is a CD20 CAR (e.g., a CD20 CAR disclosed herein). In some embodiments, the CD20 CAR comprises an amino acid sequence disclosed in Table 11, 12, or 13 (e.g., a CDR, scFv, or full-length amino acid sequence disclosed in Table 11, 12, or 13), or a sequence at least about 85%, 90%, 95%, 99% or more identical thereto, and/or having one, two, three or more substitutions, insertions or deletions, e.g., conserved substitutions. In some embodiments, the second CAR is a CD22 CAR (e.g., a CD22 CAR disclosed herein). In some embodiments, the CD22 CAR comprises an amino acid sequence disclosed in Table 14 or 15 (e.g., a CDR, scFv, or full-length amino acid sequence disclosed in Table 14 or 15), or a sequence at least about 85%, 90%, 95%, 99% or more identical thereto, and/or having one, two, three or more substitutions, insertions or deletions, e.g., conserved substitutions.

[0288] In some embodiments, the second therapy is a CAR-expressing cell therapy comprising a cell expressing a multispecific CAR, e.g., a bispecific CAR that binds to a first antigen and a second antigen, wherein the first antigen is BCMA. In some embodiments, the second antigen is selected from the group consisting of CD19, CD20, and CD22. In some embodiments, the second antigen is CD19. In some embodiments, the second antigen is CD20. In some embodiments, the second antigen is CD22.

[0289] In one aspect, disclosed herein is a method of treating a subject having a disease associated with the expression of BCMA, comprising administering a BCMA CAR-expressing cell therapy and a second therapy to the subject. In some embodiments, the second therapy is a CD19 inhibitor, e.g., a CD19 inhibitor disclosed herein. In some embodiments, the CD19 inhibitor is administered after the administration of the BCMA CAR-expressing cell therapy, e.g., after CD19 expression is increased in the subject following the administration of the BCMA CAR-expressing cell therapy.

[0290] In some embodiments, the second therapy is a CD20 inhibitor, e.g., a CD20 inhibitor disclosed herein. In some embodiments, the CD20 inhibitor is a multispecific antibody molecule, e.g., a bispecific antibody molecule, that binds to CD20 and CD3, e.g., THG338. In some embodiments, the CD20 inhibitor is administered after the administration of the BCMA CAR-expressing cell therapy, e.g., after CD20 expression is increased in the subject following the administration of the BCMA CAR-expressing cell therapy.

[0291] In some embodiments, the second therapy is a CD22 inhibitor, e.g., a CD22 inhibitor disclosed herein. In some embodiments, the CD22 inhibitor is administered after the administration of the BCMA CAR-expressing cell therapy, e.g., after CD22 expression is increased in the subject following the administration of the BCMA CAR-expressing cell therapy.

[0292] In one aspect, disclosed herein is a method of treating a subject having a disease associated with the expression of BCMA, comprising administering a BCMA CAR-expressing cell therapy and a second therapy to the subject, wherein the second therapy is a molecule that binds to Fc receptor like 2 (FCRL2) or Fc receptor like 5 (FCRL5). In some embodiments, the molecule is a CAR-expressing cell therapy comprising a cell expressing a CAR that binds to FCRL2 or FCRL5. In some embodiments, the molecule is a multispecific antibody molecule, e.g., a bispecific antibody molecule, that binds to a first antigen and a second antigen, wherein the first antigen is FCRL2 or FCRL5, optionally wherein the second antigen is CD3.

[0293] In one aspect, disclosed herein is a method of treating a subject having a disease associated with the expression of BCMA, comprising administering a BCMA CAR-expressing cell therapy and a second therapy to the subject, wherein the second therapy is an inhibitor of TGF beta.

[0294] In one aspect, disclosed herein is a method of treating a subject having a disease associated with the expression of BCMA, comprising administering a BCMA CAR-expressing cell therapy and a second therapy to the subject, wherein the second therapy is an EGFR inhibitor, e.g., an EGFR′-tyrosine kinase inhibitor (TKI). In some embodiments, the EGFR inhibitor is EGF816. In some embodiments, the EGFR inhibitor is (R,E)-N-(7-chloro-1-(1-(4-(dimethylamino)but-2-enoyl)azepan-3-yl)-1H-benzo[d]imidazol-2-yl)-2-methylisonicotinamide. In some embodiments, the EGFR inhibitor is compound A40 disclosed in Table 27.

[0295] In one aspect, disclosed herein is a method of treating a subject having a disease associated with the expression of BCMA, comprising administering a BCMA CAR-expressing cell therapy and a second therapy to the subject, wherein the second therapy is an adenosine A2AR antagonist. In some embodiments, the adenosine A2AR antagonist is selected from the group consisting of PBF509, CPI444, AZD4635, Vipadenant, GBV-2034, and AB928. In some embodiments, the adenosine A2AR antagonist is selected from the group consisting of 5-bromo-2,6-di-(1H-pyrazol-1-yl)pyrimidine-4-amine; (S)-7-(5-methylfuran-2-yl)-3-((6-(((tetrahydrofuran-3-yl)oxy)methyl)pyridin-2-yl)methyl)-3H-[1,2,3]triazolo[4,5-d]pyrimidin-5-amine; (R)-7-(5-methylfuran-2-yl)-3-((6-(((tetrahydrofuran-3-yl)oxy)methyl)pyridin-2-yl)methyl)-3H-[1,2,3]triazolo[4,5-d]pyrimidin-5-amine, or racemate thereof; 7-(5-methylfuran-2-yl)-3-((6-(((tetrahydrofuran-3-yl)oxy)methyl)pyridin-2-yl)methyl)-3H-[1,2,3]triazolo[4,5-d]pyrimidin-5-amine; and 6-(2-chloro-6-methylpyridin-4-yl)-5-(4-fluorophenyl)-1,2,4-triazin-3-amine

[0296] In one aspect, disclosed herein is a method of treating a subject having a disease associated with the expression of BCMA, comprising administering a BCMA CAR-expressing cell therapy and a second therapy to the subject, wherein the second therapy is an anti-CD73 antibody molecule, e.g., an anti-CD73 antibody molecule disclosed herein.

[0297] In one aspect, disclosed herein is a method of treating a subject having a disease associated with the expression of BCMA, comprising administering a BCMA CAR-expressing cell therapy and a second therapy to the subject, wherein the second therapy is a check point inhibitor. In some embodiments, the check point inhibitor is a PD-1 inhibitor. In some embodiments, the PD-1 inhibitor is selected from the group consisting of PDR001, Nivolumab, Pembrolizumab, Pidilizumab, MEDI0680, REGN2810, TSR-042, PF-06801591, and AMP-224. In some embodiments, the PD-1 inhibitor is administered after the administration of the BCMA CAR-expressing cell therapy, e.g., after the expression of PD-1 or PD-L1 is increased in the subject following the administration of the BCMA CAR-expressing cell therapy. In some embodiments, the PD-1 inhibitor increases expansion of BCMA CAR-expressing cells in the subject, e.g. for at least 1, 2, 3, 4, or 5 weeks, e.g., for at least, 1, 2, 3, 4, 5, 10, 15, 20, 25, or 30-fold. In some embodiments, the BCMA CAR-expressing cells are administered to the subject prior to the administration of the PD-1 inhibitor. In some embodiments, the BCMA CAR-expressing cells do not expand or have minimal expansion (e.g., no more than 1, 2, 3, 4, 5, or 10-fold expansion) in the subject at the time the PD-1 inhibitor is administered. In some embodiments, the check point inhibitor is a PD-L1 inhibitor. In some embodiments, the PD-L1 inhibitor is selected from the group consisting of FAZ053, Atezolizumab, Avelumab, Durvalumab, and BMS-936559. In some embodiments, the PD-L1 inhibitor is administered after the administration of the BCMA CAR-expressing cell therapy, e.g., after the expression of PD-1 or PD-L1 is increased in the subject following the administration of the BCMA CAR-expressing cell therapy. In some embodiments, the PD-L1 inhibitor increases expansion of BCMA CAR-expressing cells in the subject, e.g. for at least 1, 2, 3, 4, or 5 weeks, e.g., for at least, 1, 2, 3, 4, 5, 10, 15, 20, 25, or 30-fold. In some embodiments, the BCMA CAR-expressing cells are administered to the subject prior to the administration of the PD-L1 inhibitor. In some embodiments, the BCMA CAR-expressing cells do not expand or have minimal expansion (e.g., no more than 1, 2, 3, 4, 5, or 10-fold expansion) in the subject at the time the PD-L1 inhibitor is administered. In some embodiments, the check point inhibitor is a LAG-3 inhibitor. In some embodiments, the LAG-3 inhibitor is selected from the group consisting of LAG525, BMS-986016, TSR-033, MK-4280 and REGN3767. In some embodiments, the LAG-3 inhibitor is administered after the administration of the BCMA CAR-expressing cell therapy, e.g., after the expression of LAG-3 is increased in the subject following the administration of the BCMA CAR-expressing cell therapy. In some embodiments, the check point inhibitor is a TIM-3 inhibitor. In some embodiments, the TIM-3 inhibitor is selected from the group consisting of MGB453, TSR-022, and LY3321367. In some embodiments, the TIM-3 inhibitor is administered after the administration of the BCMA CAR-expressing cell therapy, e.g., after the expression of TIM-3 is increased in the subject following the administration of the BCMA CAR-expressing cell therapy.

[0298] In one aspect, disclosed herein is a method of treating a subject having a disease associated with the expression of BCMA, comprising administering a BCMA CAR-expressing cell therapy and a second therapy to the subject, wherein the second therapy is an antibody molecule that binds to CD32B.

[0299] In one aspect, disclosed herein is a method of treating a subject having a disease associated with the expression of BCMA, comprising administering a BCMA CAR-expressing cell therapy and a second therapy to the subject, wherein the second therapy is an antibody molecule that binds to IL-17, e.g., an antagonistic antibody molecule that binds to IL-17, e.g., CJM112.

[0300] In one aspect, disclosed herein is a method of treating a subject having a disease associated with the expression of BCMA, comprising administering a BCMA CAR-expressing cell therapy and a second therapy to the subject, wherein the second therapy is an antibody molecule that binds to IL-1 beta.

[0301] In one aspect, disclosed herein is a method of treating a subject having a disease associated with the expression of BCMA, comprising administering a BCMA CAR-expressing cell therapy and a second therapy to the subject, wherein the second therapy is an inhibitor of indoleamine 2,3-dioxygenase (IDO) and/or tryptophan 2,3-dioxygenase (TDO), e.g., an IDO1 inhibitor. In some embodiments, the inhibitor of IDO and/or TDO is INCB24360, indoximod, NLG919, epacadostat, NLG919, or F001287. In some embodiments, the inhibitor of IDO and/or TDO is (4E)-4-[(3-chloro-4-fluoroanilino)-nitrosomethylidene]-1,2,5-oxadiazol-3-amine, 1-methyl-D-tryptophan, α-cyclohexyl-5H-Imidazo[5,1-a]isoindole-5-ethanol, or the D isomer of 1-methyl-tryptophan. In some embodiments, the inhibitor of IDO and/or TDO is administered after the administration of the BCMA CAR-expressing cell therapy, e.g., after IDO and/or TDO expression is increased in the subject following the administration of the BCMA CAR-expressing cell therapy.

[0302] In certain embodiments for the foregoing aspects, the second therapy is administered prior to, concurrently with, or subsequent to the administration of the BCMA CAR-expressing cell therapy.

[0303] In one aspect, disclosed herein is a method of treating a subject having a disease associated with the expression of BCMA, wherein the subject has received or is receiving a BCMA CAR-expressing cell therapy, comprising:

[0304] responsive to an increase in a value of the level or activity of an antigen in the subject, e.g., in a sample from the subject (e.g., a biopsy sample, e.g., a bone marrow biopsy sample), at at least one time point after the subject began receiving the BCMA CAR-expressing cell therapy, relative to a reference value, wherein the reference value is:

[0305] (i) the level or activity of the antigen in the subject, e.g., in a sample from the subject (e.g., a biopsy sample, e.g., a bone marrow biopsy sample), prior to the at least one time point (e.g., the level or activity of the antigen in the subject before the subject began receiving the BCMA CAR-expressing cell therapy, or the level or activity of the antigen in the subject after the subject began receiving the BCMA CAR-expressing cell therapy but prior to the at least one time point);

[0306] (ii) the level or activity of the antigen in a different subject having the disease associated with the expression of BCMA; or

[0307] (iii) an average level or activity of the antigen in a population of subjects having the disease associated with the expression of BCMA, administering an inhibitor of the antigen to the subject, wherein:

[0308] (1) the antigen is CD19 and the inhibitor of the antigen is a CD19 inhibitor, optionally wherein the CD19 inhibitor is:
[0309] (a) a CD19 CAR-expressing cell therapy, e.g., a CD19 CAR-expressing cell therapy disclosed herein, e.g., CTL119 or CTL019;
[0310] (b) a CAR-expressing cell therapy comprising a cell expressing a first CAR and a second CAR, wherein the first CAR is a BCMA CAR (e.g., a BCMA CAR disclosed herein) and the second CAR is a CD19 CAR (e.g., a CD19 CAR disclosed herein); or
[0311] (c) a CAR-expressing cell therapy comprising a cell expressing a multispecific CAR, e.g., a bispecific CAR, that binds to BCMA and CD19,

[0312] (2) the antigen is CD20 and the inhibitor of the antigen is a CD20 inhibitor, optionally wherein the CD20 inhibitor is:
[0313] (d) a CD20 CAR-expressing cell therapy, e.g., a CD20 CAR-expressing cell therapy disclosed herein;
[0314] (e) a CAR-expressing cell therapy comprising a cell expressing a first CAR and a second CAR, wherein the first CAR is a BCMA CAR (e.g., a BCMA CAR disclosed herein) and the second CAR is a CD20 CAR (e.g., a CD20 CAR disclosed herein);
[0315] (f) a CAR-expressing cell therapy comprising a cell expressing a multispecific CAR, e.g., a bispecific CAR, that binds to BCMA and CD20; or
[0316] (g) a multispecific antibody molecule, e.g., a bispecific antibody molecule, that binds to CD20 and CD3, e.g., THG338,

[0317] (3) the antigen is CD22 and the inhibitor of the antigen is a CD22 inhibitor, optionally wherein the CD22 inhibitor is:
[0318] (h) a CD22 CAR-expressing cell therapy, e.g., a CD22 CAR-expressing cell therapy disclosed herein;
[0319] (i) a CAR-expressing cell therapy comprising a cell expressing a first CAR and a second CAR, wherein the first CAR is a BCMA CAR (e.g., a BCMA CAR disclosed herein) and the second CAR is a CD22 CAR (e.g., a CD22 CAR disclosed herein); or
[0320] (j) a CAR-expressing cell therapy comprising a cell expressing a multispecific CAR, e.g., a bispecific CAR, that binds to BCMA and CD22,

[0321] (4) the antigen is PD1 or PD-L1 and the inhibitor of the antigen is an anti-PD1 antibody molecule or an anti-PD-L1 antibody molecule, optionally wherein the inhibitor of the antigen is:
[0322] (k) PDR001, Nivolumab, Pembrolizumab, Pidilizumab, MEDI0680, REGN2810, TSR-042, PF-06801591, or AMP-224; or
[0323] (l) FAZ053, Atezolizumab, Avelumab, Durvalumab, or BMS-936559,

[0324] (5) the antigen is IDO or TDO and the inhibitor of the antigen is an inhibitor of IDO and/or TDO, optionally wherein the inhibitor of IDO and/or TDO is:
[0325] (m) INCB24360, indoximod, NLG919, epacadostat, NLG919, or F001287; or
[0326] (n) (4E)-4-[(3-chloro-4-fluoroanilino)-nitrosomethylidene]-1,2,5-oxadiazol-3-amine, 1-methyl-D-tryptophan, α-cyclohexyl-5H-Imidazo[5,1-a]isoindole-5-ethanol, or the D isomer of 1-methyl-tryptophan, or

[0327] (6) the antigen is TGF-beta and the inhibitor of the antigen is a TGF beta inhibitor.

[0328] In one aspect, disclosed herein is a method of treating a subject having a disease associated with the expression of BCMA, wherein the subject has received or is receiving a BCMA CAR-expressing cell therapy, comprising:

[0329] acquiring a value of the level or activity of an antigen in the subject, e.g., in a sample from the subject (e.g., a biopsy sample, e.g., a bone marrow biopsy sample), at at least one time point after the subject began receiving the BCMA CAR-expressing cell therapy, responsive to an increase in the value relative to a reference value, wherein the reference value is:

[0330] (i) the level or activity of the antigen in the subject, e.g., in a sample from the subject (e.g., a biopsy sample, e.g., a bone marrow biopsy sample), prior to the at least one time point (e.g., the level or activity of the antigen in the subject before the subject began receiving the BCMA CAR-expressing cell therapy, or the level or activity of the antigen in the subject after the subject began receiving the BCMA CAR-expressing cell therapy but prior to the at least one time point);

[0331] (ii) the level or activity of the antigen in a different subject having the disease associated with the expression of BCMA; or

[0332] (iii) an average level or activity of the antigen in a population of subjects having the disease associated with the expression of BCMA,

[0333] administering an inhibitor of the antigen to the subject, wherein:

[0334] (1) the antigen is CD19 and the inhibitor of the antigen is a CD19 inhibitor, optionally wherein the CD19 inhibitor is:
[0335] (a) a CD19 CAR-expressing cell therapy, e.g., a CD19 CAR-expressing cell therapy disclosed herein, e.g., CTL119 or CTL019;
[0336] (b) a CAR-expressing cell therapy comprising a cell expressing a first CAR and a second CAR, wherein the first CAR is a BCMA CAR (e.g., a BCMA CAR disclosed herein) and the second CAR is a CD19 CAR (e.g., a CD19 CAR disclosed herein); or
[0337] (c) a CAR-expressing cell therapy comprising a cell expressing a multispecific CAR, e.g., a bispecific CAR, that binds to BCMA and CD19,

[0338] (2) the antigen is CD20 and the inhibitor of the antigen is a CD20 inhibitor, optionally wherein the CD20 inhibitor is:
[0339] (d) a CD20 CAR-expressing cell therapy, e.g., a CD20 CAR-expressing cell therapy disclosed herein;
[0340] (e) a CAR-expressing cell therapy comprising a cell expressing a first CAR and a second CAR, wherein the first CAR is a BCMA CAR (e.g., a BCMA CAR disclosed herein) and the second CAR is a CD20 CAR (e.g., a CD20 CAR disclosed herein);
[0341] (f) a CAR-expressing cell therapy comprising a cell expressing a multispecific CAR, e.g., a bispecific CAR, that binds to BCMA and CD20; or
[0342] (g) a multispecific antibody molecule, e.g., a bispecific antibody molecule, that binds to CD20 and CD3, e.g., THG338,

[0343] (3) the antigen is CD22 and the inhibitor of the antigen is a CD22 inhibitor, optionally wherein the CD22 inhibitor is:
[0344] (h) a CD22 CAR-expressing cell therapy, e.g., a CD22 CAR-expressing cell therapy disclosed herein;
[0345] (i) a CAR-expressing cell therapy comprising a cell expressing a first CAR and a second CAR, wherein the first CAR is a BCMA CAR (e.g., a BCMA CAR disclosed herein) and the second CAR is a CD22 CAR (e.g., a CD22 CAR disclosed herein); or
[0346] (j) a CAR-expressing cell therapy comprising a cell expressing a multispecific CAR, e.g., a bispecific CAR, that binds to BCMA and CD22,

[0347] (4) the antigen is PD1 or PD-L1 and the inhibitor of the antigen is an anti-PD1 antibody molecule or an anti-PD-L1 antibody molecule, optionally wherein the inhibitor of the antigen is:
[0348] (k) PDR001, Nivolumab, Pembrolizumab, Pidilizumab, MEDI0680, REGN2810, TSR-042, PF-06801591, or AMP-224; or
[0349] (l) FAZ053, Atezolizumab, Avelumab, Durvalumab, or BMS-936559,

[0350] (5) the antigen is IDO or TDO and the inhibitor of the antigen is an inhibitor of IDO and/or TDO, optionally wherein the inhibitor of IDO and/or TDO is:
[0351] (m) INCB24360, indoximod, NLG919, epacadostat, NLG919, or F001287; or
[0352] (n) (4E)-4-[(3-chloro-4-fluoroanilino)-nitrosomethylidene]-1,2,5-oxadiazol-3-amine, 1-methyl-D-tryptophan, α-cyclohexyl-5H-Imidazo[5,1-a]isoindole-5-ethanol, or the D isomer of 1-methyl-tryptophan, or

[0353] (6) the antigen is TGF-beta and the inhibitor of the antigen is a TGF beta inhibitor.

[0354] In one aspect, disclosed herein is a method of treating a subject having a disease associated with the expression of BCMA, comprising:

[0355] administering a BCMA CAR-expressing cell therapy to the subject,

[0356] responsive to an increase in a value of the level or activity of an antigen in the subject, e.g., in a sample from the subject (e.g., a biopsy sample, e.g., a bone marrow biopsy sample), at at least one time point after the subject began receiving the BCMA CAR-expressing cell therapy, relative to a reference value, wherein the reference value is:

[0357] (i) the level or activity of the antigen in the subject, e.g., in a sample from the subject (e.g., a biopsy sample, e.g., a bone marrow biopsy sample), prior to the at least one time point (e.g., the level or activity of the antigen in the subject before the subject began receiving the BCMA CAR-expressing cell therapy, or the level or activity of the antigen in the subject after the subject began receiving the BCMA CAR-expressing cell therapy but prior to the at least one time point);

[0358] (ii) the level or activity of the antigen in a different subject having the disease associated with the expression of BCMA; or

[0359] (iii) an average level or activity of the antigen in a population of subjects having the disease associated with the expression of BCMA,

[0360] administering an inhibitor of the antigen to the subject, wherein:

[0361] (1) the antigen is CD19 and the inhibitor of the antigen is a CD19 inhibitor, optionally wherein the CD19 inhibitor is:
[0362] (a) a CD19 CAR-expressing cell therapy, e.g., a CD19 CAR-expressing cell therapy disclosed herein, e.g., CTL119 or CTL019;
[0363] (b) a CAR-expressing cell therapy comprising a cell expressing a first CAR and a second CAR, wherein the first CAR is a BCMA CAR (e.g., a BCMA CAR disclosed herein) and the second CAR is a CD19 CAR (e.g., a CD19 CAR disclosed herein); or
[0364] (c) a CAR-expressing cell therapy comprising a cell expressing a multispecific CAR, e.g., a bispecific CAR, that binds to BCMA and CD19,

[0365] (2) the antigen is CD20 and the inhibitor of the antigen is a CD20 inhibitor, optionally wherein the CD20 inhibitor is:
[0366] (d) a CD20 CAR-expressing cell therapy, e.g., a CD20 CAR-expressing cell therapy disclosed herein;
[0367] (e) a CAR-expressing cell therapy comprising a cell expressing a first CAR and a second CAR, wherein the first CAR is a BCMA CAR (e.g., a BCMA CAR disclosed herein) and the second CAR is a CD20 CAR (e.g., a CD20 CAR disclosed herein);
[0368] (f) a CAR-expressing cell therapy comprising a cell expressing a multispecific CAR, e.g., a bispecific CAR, that binds to BCMA and CD20; or
[0369] (g) a multispecific antibody molecule, e.g., a bispecific antibody molecule, that binds to CD20 and CD3, e.g., THG338,

[0370] (3) the antigen is CD22 and the inhibitor of the antigen is a CD22 inhibitor, optionally wherein the CD22 inhibitor is:
[0371] (h) a CD22 CAR-expressing cell therapy, e.g., a CD22 CAR-expressing cell therapy disclosed herein;
[0372] (i) a CAR-expressing cell therapy comprising a cell expressing a first CAR and a second CAR, wherein the first CAR is a BCMA CAR (e.g., a BCMA CAR disclosed herein) and the second CAR is a CD22 CAR (e.g., a CD22 CAR disclosed herein); or
[0373] (j) a CAR-expressing cell therapy comprising a cell expressing a multispecific CAR, e.g., a bispecific CAR, that binds to BCMA and CD22,

[0374] (4) the antigen is PD1 or PD-L1 and the inhibitor of the antigen is an anti-PD1 antibody molecule or an anti-PD-L1 antibody molecule, optionally wherein the inhibitor of the antigen is:
[0375] (k) PDR001, Nivolumab, Pembrolizumab, Pidilizumab, MEDI0680, REGN2810, TSR-042, PF-06801591, or AMP-224; or
[0376] (l) FAZ053, Atezolizumab, Avelumab, Durvalumab, or BMS-936559,

[0377] (5) the antigen is IDO or TDO and the inhibitor of the antigen is an inhibitor of IDO and/or TDO, optionally wherein the inhibitor of IDO and/or TDO is:
[0378] (m) INCB24360, indoximod, NLG919, epacadostat, NLG919, or F001287; or
[0379] (n) (4E)-4-[(3-chloro-4-fluoroanilino)-nitrosomethylidene]-1,2,5-oxadiazol-3-amine, 1-methyl-D-tryptophan, α-cyclohexyl-5H-Imidazo[5,1-a]isoindole-5-ethanol, or the D isomer of 1-methyl-tryptophan, or

[0380] (6) the antigen is TGF-beta and the inhibitor of the antigen is a TGF beta inhibitor.

[0381] In one aspect, disclosed herein is method of treating a subject having a disease associated with the expression of BCMA, comprising:

[0382] administering a BCMA CAR-expressing cell therapy to the subject,

[0383] acquiring a value of the level or activity of an antigen in the subject, e.g., in a sample from the subject (e.g., a biopsy sample, e.g., a bone marrow biopsy sample), at at least one time point after the subject began receiving the BCMA CAR-expressing cell therapy,

[0384] responsive to an increase in the value relative to a reference value, wherein the reference value is:

[0385] (i) the level or activity of the antigen in the subject, e.g., in a sample from the subject (e.g., a biopsy sample, e.g., a bone marrow biopsy sample), prior to the at least one time point (e.g., the level or activity of the antigen in the subject before the subject began receiving the BCMA CAR-expressing cell therapy, or the level or activity of the antigen in the subject after the subject began receiving the BCMA CAR-expressing cell therapy but prior to the at least one time point);

[0386] (ii) the level or activity of the antigen in a different subject having the disease associated with the expression of BCMA; or

[0387] (iii) an average level or activity of the antigen in a population of subjects having the disease associated with the expression of BCMA,

[0388] administering an inhibitor of the antigen to the subject, wherein:

[0389] (1) the antigen is CD19 and the inhibitor of the antigen is a CD19 inhibitor, optionally wherein the CD19 inhibitor is:
[0390] (a) a CD19 CAR-expressing cell therapy, e.g., a CD19 CAR-expressing cell therapy disclosed herein, e.g., CTL119 or CTL019;
[0391] (b) a CAR-expressing cell therapy comprising a cell expressing a first CAR and a second CAR, wherein the first CAR is a BCMA CAR (e.g., a BCMA CAR disclosed herein) and the second CAR is a CD19 CAR (e.g., a CD19 CAR disclosed herein); or
[0392] (c) a CAR-expressing cell therapy comprising a cell expressing a multispecific CAR, e.g., a bispecific CAR, that binds to BCMA and CD19,

[0393] (2) the antigen is CD20 and the inhibitor of the antigen is a CD20 inhibitor, optionally wherein the CD20 inhibitor is:
[0394] (d) a CD20 CAR-expressing cell therapy, e.g., a CD20 CAR-expressing cell therapy disclosed herein;
[0395] (e) a CAR-expressing cell therapy comprising a cell expressing a first CAR and a second CAR, wherein the first CAR is a BCMA CAR (e.g., a BCMA CAR disclosed herein) and the second CAR is a CD20 CAR (e.g., a CD20 CAR disclosed herein);
[0396] (f) a CAR-expressing cell therapy comprising a cell expressing a multispecific CAR, e.g., a bispecific CAR, that binds to BCMA and CD20; or
[0397] (g) a multispecific antibody molecule, e.g., a bispecific antibody molecule, that binds to CD20 and CD3, e.g., THG338,

[0398] (3) the antigen is CD22 and the inhibitor of the antigen is a CD22 inhibitor, optionally wherein the CD22 inhibitor is:
[0399] (h) a CD22 CAR-expressing cell therapy, e.g., a CD22 CAR-expressing cell therapy disclosed herein;
[0400] (i) a CAR-expressing cell therapy comprising a cell expressing a first CAR and a second CAR, wherein the first CAR is a BCMA CAR (e.g., a BCMA CAR disclosed herein) and the second CAR is a CD22 CAR (e.g., a CD22 CAR disclosed herein); or
[0401] (j) a CAR-expressing cell therapy comprising a cell expressing a multispecific CAR, e.g., a bispecific CAR, that binds to BCMA and CD22,

[0402] (4) the antigen is PD1 or PD-L1 and the inhibitor of the antigen is an anti-PD1 antibody molecule or an anti-PD-L1 antibody molecule, optionally wherein the inhibitor of the antigen is:
[0403] (k) PDR001, Nivolumab, Pembrolizumab, Pidilizumab, MEDI0680, REGN2810, TSR-042, PF-06801591, or AMP-224; or
[0404] (l) FAZ053, Atezolizumab, Avelumab, Durvalumab, or BMS-936559,

[0405] (5) the antigen is IDO or TDO and the inhibitor of the antigen is an inhibitor of IDO and/or TDO, optionally wherein the inhibitor of IDO and/or TDO is:
[0406] (m) INCB24360, indoximod, NLG919, epacadostat, NLG919, or F001287; or
[0407] (n) (4E)-4-[(3-chloro-4-fluoroanilino)-nitrosomethylidene]-1,2,5-oxadiazol-3-amine, 1-methyl-D-tryptophan, α-cyclohexyl-5H-Imidazo[5,1-a]isoindole-5-ethanol, or the D isomer of 1-methyl-tryptophan, or

[0408] (6) the antigen is TGF-beta and the inhibitor of the antigen is a TGF beta inhibitor.

[0409] In certain embodiments of the foregoing aspects, the value of the level or activity of the antigen comprises the expression level of the antigen in the subject, e.g., in a sample from the subject (e.g., a biopsy sample, e.g., a bone marrow biopsy sample), as measured by an assay described herein, e.g., immunohistochemistry.

[0410] In some embodiments, the at least one time point is 5, 10, 15, 20, 25, 28, 30, 35, 40, 45, 50, 55, 60, 65, 70, 75, 80, or 90 days after the subject began receiving the BCMA CAR-expressing cell therapy.

[0411] In some embodiments, the subject experiences a decrease in BCMA expression after the subject began receiving the BCMA CAR-expressing cell therapy.

[0412] In certain embodiments of the foregoing aspects, the BCMA CAR-expressing cell therapy comprises a cell expressing a BCAM CAR. In some embodiments, the BCMA CAR comprises one or more of (e.g., all three of) heavy chain complementary determining region 1 (HCDR1), HCDR2, and HCDR3 listed in Table 3 or 5 and/or one or more of (e.g., all three of) light chain complementary determining region 1 (LCDR1), LCDR2, and LCDR3 listed in Table 4 or 5, or a sequence with 95-99% identify thereof. In some embodiments, the BCMA CAR comprises a heavy chain variable region (VH) listed in Table 2 or 5 and/or a light chain variable region (VL) listed in Table 2 or 5, or a sequence with 95-99% identify thereof. In some embodiments, the BCMA CAR comprises a BCMA scFv domain amino acid sequence listed in Table 2 or 5 (e.g., SEQ ID NO: 39, SEQ ID NO: 40, SEQ ID NO: 41, SEQ ID NO: 42, SEQ ID NO: 43, SEQ ID NO: 44, SEQ ID NO: 45, SEQ ID NO: 46, SEQ ID NO: 47, SEQ ID NO: 48, SEQ ID NO: 49, SEQ ID NO: 50, SEQ ID NO: 51, SEQ ID NO: 52, SEQ ID NO: 53, SEQ ID NO: 129, SEQ ID NO: 130, SEQ ID NO: 131, SEQ ID NO: 132, SEQ ID NO: 133, SEQ ID NO: 134, SEQ ID NO: 135, SEQ ID NO: 136, SEQ ID NO: 137, SEQ ID NO: 138, SEQ ID NO: 139, SEQ ID NO: 140, SEQ ID NO: 141, SEQ ID NO: 142, SEQ ID NO: 143, SEQ ID NO: 144, SEQ ID NO: 145, SEQ ID NO: 146, SEQ ID NO: 147, SEQ ID NO: 148, and SEQ ID NO: 149), or a sequence with 95-99% identify thereof. In some embodiments, the BCMA CAR comprises a full-length BCMA CAR amino acid sequence listed in Table 2 or 5 (e.g., residues 22-483 of SEQ ID NO: 109, residues 22-490 of SEQ ID NO: 99, residues 22-488 of SEQ ID NO: 100, residues 22-487 of SEQ ID NO: 101, residues 22-493 of SEQ ID NO: 102, residues 22-490 of SEQ ID NO: 103, residues 22-491 of SEQ ID NO: 104, residues 22-482 of SEQ ID NO: 105, residues 22-483 of SEQ ID NO: 106, residues 22-485 of SEQ ID NO: 107, residues 22-483 of SEQ ID NO: 108, residues 22-490 of SEQ ID NO: 110, residues 22-483 of SEQ ID NO: 111, residues 22-484 of SEQ ID NO: 112, residues 22-485 of SEQ ID NO: 113, residues 22-487 of SEQ ID NO: 213, residues 23-489 of SEQ ID NO: 214, residues 22-490 of SEQ ID NO: 215, residues 22-484 of SEQ ID NO: 216, residues 22-485 of SEQ ID NO: 217, residues 22-489 of SEQ ID NO: 218, residues 22-497 of SEQ ID NO: 219, residues 22-492 of SEQ ID NO: 220, residues 22-490 of SEQ ID NO: 221, residues 22-485 of SEQ ID NO: 222, residues 22-492 of SEQ ID NO: 223, residues 22-492 of SEQ ID NO: 224, residues 22-483 of SEQ ID NO: 225, residues 22-490 of SEQ ID NO: 226, residues 22-485 of SEQ ID NO: 227, residues 22-486 of SEQ ID NO: 228, residues 22-492 of SEQ ID NO: 229, residues 22-488 of SEQ ID NO: 230, residues 22-488 of SEQ ID NO: 231, residues 22-495 of SEQ ID NO: 232, residues 22-490 of SEQ ID NO: 233), or a sequence with 95-99% identify thereof. In some embodiments, the BCMA CAR is encoded by a nucleic acid sequence listed in Table 2 or 5 (e.g., SEQ ID NO: 54, SEQ ID NO: 55, SEQ ID NO: 56, SEQ ID NO: 57, SEQ ID NO: 58, SEQ ID NO: 59, SEQ ID NO: 60, SEQ ID NO: 61, SEQ ID NO: 62, SEQ ID NO: 63, SEQ ID NO: 64, SEQ ID NO: 65, SEQ ID NO: 66, SEQ ID NO: 67, SEQ ID NO: 68, SEQ ID NO: 150, SEQ ID NO: 151, SEQ ID NO: 152, SEQ ID NO: 153, SEQ ID NO: 154, SEQ ID NO: 155, SEQ ID NO: 156, SEQ ID NO: 157, SEQ ID NO: 158, SEQ ID NO: 159, SEQ ID NO: 160, SEQ ID NO: 161, SEQ ID NO: 162, SEQ ID NO: 163, SEQ ID NO: 164, SEQ ID NO: 165, SEQ ID NO: 166, SEQ ID NO: 167, SEQ ID NO: 168, SEQ ID NO: 169, SEQ ID NO: 170), or a sequence with 95-99% identify thereof.

[0413] In certain embodiments of the foregoing aspects, the disease associated with the expression of BCMA is cancer, optionally wherein the cancer is a hematological cancer. In some embodiments, the disease associated with the expression of BCMA is an acute leukemia chosen from one or more of B-cell acute lymphoid leukemia (“BALL”), T-cell acute lymphoid leukemia (“TALL”), acute lymphoid leukemia (ALL); chronic myelogenous leukemia (CML), chronic lymphocytic leukemia (CLL); B cell prolymphocytic leukemia, blastic plasmacytoid dendritic cell neoplasm, Burkitt's lymphoma, diffuse large B cell lymphoma, follicular lymphoma, hairy cell leukemia, small cell- or a large cell-follicular lymphoma, malignant lymphoproliferative conditions, MALT lymphoma, mantle cell lymphoma, Marginal zone lymphoma, multiple myeloma, myelodysplasia and myelodysplastic syndrome, non-Hodgkin's lymphoma, plasmablastic lymphoma, plasmacytoid dendritic cell neoplasm, Waldenstrom macroglobulinemia; a prostate cancer (e.g., castrate-resistant or therapy-resistant prostate cancer, or metastatic prostate cancer), pancreatic cancer, lung cancer; or a plasma cell proliferative disorder (e.g., asymptomatic myeloma (smoldering multiple myeloma or indolent myeloma), monoclonal gammapathy of undetermined significance (MGUS), Waldenstrom's macroglobulinemia, plasmacytomas (e.g., plasma cell dyscrasia, solitary myeloma, solitary plasmacytoma, extramedullary plasmacytoma, and multiple plasmacytoma), systemic amyloid light chain amyloidosis, and POEMS syndrome (also known as Crow-Fukase syndrome, Takatsuki disease, and PEP syndrome)), or a combination thereof. In some embodiments, the disease associated with the expression of BCMA is ALL, CLL, DLBCL, or multiple myeloma. In some embodiments, the subject is a human patient.

[0414] The materials, methods, and examples are illustrative only and not intended to be limiting.

[0415] Headings, sub-headings or numbered or lettered elements, e.g., (a), (b), (i) etc, are presented merely for ease of reading. The use of headings or numbered or lettered elements in this document does not require the steps or elements be performed in alphabetical order or that the steps or elements are necessarily discrete from one another.

[0416] All publications, patent applications, patents, and other references mentioned herein are incorporated by reference in their entirety.

[0417] Other features, objects, and advantages of the invention will be apparent from the description and drawings, and from the claims.

### BRIEF DESCRIPTION OF THE DRAWINGS

[0418] The patent or application file contains at least one drawing executed in color. Copies of this patent or patent application publication with color drawing(s) will be provided by the Office upon request and payment of the necessary fee.

[0419] FIGS. 1A and 1B are a pair of graphs showing the percentage of CD4+ or CD8+ T cells among CD3+ T cells (FIG. 1A) and the CD4:CD8 T cell ratio (FIG. 1B) in apheresis samples acquired from multiple myeloma patients who were later determined to be Responders (R, N_{R}=3) or Non-Responders (NR, N_{NR}=5) to treatment with an infusion of CART-BCMA. These data demonstrate that Responders had a higher percentage of CD4+ T cells and a lower percentage of CD8+ T cells (and thus a higher CD4:CD8 ratio) in their apheresis sample than Non-Responders did. A CD4:CD8 ratio greater than about 1.6 was found to be predictive of response to CART-BCMA.

[0420] FIGS. 2A, 2B, and 2C are graphs showing that the percentage of HLADR-CD95+CD27+CD8+ T cells (FIG. 2A), CD45RO−CD27+CD8+ T cells (FIG. 2B), or CCR7+CD45RO−CD27+CD8+ T cells (FIG. 2C) among CD8+ T cells is higher in apheresis samples acquired from multiple myeloma patients who were later determined to be Responders (R, N_{R}=3) to CART-BCMA as compared to Non-Responders (NR, N_{NR}=5). P-values are shown for each graph.

[0421] FIG. 3 is a series of images showing CD138+ cell localization as determined by immunohistochemistry (IHC) in bone marrow core biopsies acquired prior to administration (“Pre”), and on Day 28 and Day 90 (“3 month”) post-infusion of CART-BCMA from Patient 13, Patient 14, Patient 15, Patient 16, and Patient 17. Patient outcomes to treatment with CART-BCMA are provided in the Examples and are referred to herein as follows: Progressive disease (PD); Stable disease (SD); Minor response (MR); Partial regression (PR); and Very good partial regression (VGPR). Pretreatment, Day 28, and Day 90 samples acquired from Patient 13 had 1%, 0%, and 0% CD138+ MM cell infiltration, respectively. Pretreatment and Day 28 samples acquired from Patient 14 had 80% and 90% CD138+ MM cell infiltration, respectively. Pretreatment, Day 28, and Day 90 samples acquired from Patient 15 had 95%, 5%, and 10% CD138+ MM cell infiltration, respectively. Pretreatment, Day 28, and Day 90 samples acquired from Patient 16 had 50%, 5%, and 75% CD138+ MM cell infiltration, respectively. Pretreatment, Day 28, and Day 90 samples acquired from Patient 17 had 50%, 5%, and 75% CD138+ MM cell infiltration, respectively.

[0422] FIG. 4 is a series of images showing BCMA protein expression as determined by IHC in bone marrow core biopsies acquired prior to administration (“Pre”), and on Day 28 and Day 90 (“3 month”) post-infusion of CART-BCMA from Patient 13, Patient 14, Patient 15, Patient 16, and Patient 17.

[0423] FIG. 5 is a series of images showing a comparison between BCMA protein expression as determined by IHC to BCMA mRNA levels as determined by in situ hybridization (ISH) in bone marrow core biopsies acquired prior to administration of CART-BCMA from Patient 13, Patient 14, Patient 15, Patient 16, and Patient 17.

[0424] FIGS. 6A, 6B, and 6C are a series of images showing BCMA protein expression as determined by IHC, BCMA mRNA levels as determined by ISH, and CART-BCMA mRNA levels as determined by ISH in bone marrow core biopsies acquired from Patient 15 (FIG. 6A), Patient 16 (FIG. 6B), and Patient 17 (FIG. 6C), prior to administration (“Pre”), and on Day 28 and Day 90 (“3 month”) post-infusion of CART-BCMA.

[0425] FIGS. 7A, 7B, and 7C are a series of images showing IDO1, IFN-γ, and TGFβ mRNA levels as determined by ISH in bone marrow core biopsies acquired from Patient 15 (FIG. 7A), Patient 16 (FIG. 7B), and Patient 17 (FIG. 7C), prior to administration (“Pre”), and on Day 28 and Day 90 (“3 month”) post-infusion of CART-BCMA. FIGS. 7D and 7E are a series of images showing CAR, IFN-γ, and IDO1 mRNA levels as determined by ISH in biopsies acquired from Patient 19 (FIG. 7D) and Patient 20 (FIG. 7E), prior to administration (“Pre”), and on Day 10 and Day 28 post-infusion of CART-BCMA.

[0426] FIGS. 8A, 8B, and 8C are a series of images showing PD-L1, PD1, CD3, and FoxP3 protein expression as determined by IHC in bone marrow core biopsies acquired from Patient 15 (FIG. 8A), Patient 16 (FIG. 8B), and Patient 17 (FIG. 8C), prior to administration (“Pre”), and on Day 28 and Day 90 (“3 month”) post-infusion of CART-BCMA. FIGS. 8D and 8E are a series of images showing PD1, PD-L1, and FoxP3 protein expression as determined by IHC in biopsies acquired from Patient 19 (FIG. 8D) and Patient 20 (FIG. 8E), prior to administration (“Pre”), and on Day 10 and Day 28 post-infusion of CART-BCMA.

[0427] FIG. 9 is a series of images showing CD19 protein expression as determined by IHC in bone marrow core biopsies acquired prior to administration (“Pre”), and on Day 28 and Day 90 (“3 month”) post-infusion of CART-BCMA from Patient 13, Patient 14, Patient 15, Patient 16, and Patient 17.

[0428] FIG. 10 is a series of images showing CD20 protein expression as determined by IHC in bone marrow core biopsies acquired prior to administration (“Pre”), and on Day 28 and Day 90 (“3 month”) post-infusion of CART-BCMA from Patient 13, Patient 14, Patient 15, Patient 16, and Patient 17.

[0429] FIGS. 11A and 11B are a series of spectrally unmixed pseudo fluorescent microscopy images showing that BCMA positive cells and CD19 positive cells are separate populations in bone marrow core biopsies acquired from Patient 15 prior to administration (“pre”) and on Day 90 (“3M”) post-infusion of CAR-BCMA.

[0430] FIGS. 12A and 12B are a series of spectrally unmixed pseudo fluorescent microscopy images showing that CD19+CD34^{dim} cell population was present in the pretreatment bone marrow core biopsies acquired from Patient 15 and Patient 17, respectively.

[0431] FIG. 13 is a series of spectrally unmixed pseudo fluorescent microscopy images showing that the CD19 population was variably CD138+ and CD138− in the pretreatment bone marrow core biopsies acquired from Patient 15.

[0432] FIG. 14 is a graph comparing the level of tumor burden in a KMS11 tumor model following implant and administration of PBS, untransduced T cells (“UTD”), or T cells transduced with either a tool CAR (“J6MO”), BCMA-4, BCMA-9, BCMA-10 (“MCM998”), BCMA-13, or BCMA-15. BCMA-10 demonstrated the most potent anti-tumor activity.

[0433] FIG. 15 is a diagram showing the design of a clinical trial (NCT Number: NCT02546167; UPCC 14415) to assess the safety and feasibility of infusion of autologous T cells expressing CART-BCMA in adult patients with multiple myeloma.

[0434] FIG. 16A is a table showing MM patient disease characteristics. FIG. 16B is a table showing the presence of baseline lymphopenia due to disease and prior therapies in MM patients.

[0435] FIGS. 17A, 17B, and 17C are graphs showing patient response for Cohort 1, Cohort 2, and Cohort 3, respectively.

[0436] FIGS. 18A and 18B are a series of graphs showing expansion of CART-BCMA evaluated by flow cytometry in Cohort 1 patients and Cohort 2/3 patients, respectively.

[0437] FIGS. 19A and 19B are a series of graphs showing expansion of CART-BCMA evaluated by PCR in Cohort 1 patients and Cohort 2/3 patients, respectively. The plots show the number of detected CART genes per μg of DNA isolated from patient's blood (y-axis) at the respective day post CART infusion (x-axis).

[0438] FIGS. 20A and 20B are graphs showing that BCMA expansion may correlate with clinical outcomes.

[0439] FIGS. 21A, 21B, 21C, and 21D are graphs showing the fraction of CAR-positive (CAR+) CD4/CD8 cells at various time points post-infusion in Responders compared to Non-Responders.

[0440] FIG. 22 is a series of graphs showing the changes in level of cytokine expression at various time points post infusion of CART-BCMA. The y-axis in each graph shows fold change from Day 0. The x-axis in each graph shows days post-infusion of CART-BCMA.

[0441] FIGS. 23A and 23B are graphs showing the change in IL-6 expression at various time points post infusion of CART-BCMA. The y-axis in each graph shows fold change from Day 0. The x-axis in each graph shows days post-infusion of CART-BCMA.

[0442] FIGS. 24A and 24B are graphs showing the change in IFN-γ expression at various time points post infusion of CART-BCMA. The y-axis in each graph shows fold change from Day 0. The x-axis in each graph shows days post-infusion of CART-BCMA.

[0443] FIGS. 25A and 25B are graphs showing the serum level of BCMA in 14 normal donors (FIG. 25A) and 12 myeloma patients (FIG. 25B).

[0444] FIGS. 26A, 26B, 26C, and 26D are graphs showing serum BCMA level at various time points post infusion of CART-BCMA. The y-axis in FIGS. 26A and 26B shows peripheral blood (PB) serum BCMA levels. The y-axis in FIGS. 26C and 26D shows PB serum BCMA level fold change from baseline. The x-axis in each graph shows days post-infusion of CART-BCMA.

[0445] FIGS. 27A, 27B, and 27C are graphs showing data collected from three multiple myeloma patients who received CART-BCMA treatment. The y-axis on the left shows the percentage of CD4+ or CD8+ CART cells. The y-axis on the right shows the level of serum BCMA (ng/mL) or the number of CART copies (BBz) per μg DNA, as evaluated by qPCR.

[0446] FIGS. 28A and 28B are graphs showing CD4+ T cell subsets of normal donors (FIG. 28A) and multiple myeloma (MM) patients (FIG. 28B). FIGS. 28C and 28D are graphs showing CD8+ T cell subsets of normal donors (FIG. 28C) and MM patients (FIG. 28D). FIGS. 28E and 28F are graphs showing CD4+ and CD8+ T cell subsets, respectively, in apheresis samples acquired from MM patients (dots with slashes represent non-responders and white dots represent responders).

[0447] FIG. 29 is a series of graphs showing T cell differentiation in apheresis samples acquired from MM patients. The x-axis shows CD45RO expression and the y-axis shows CCR7 expression. Signal in the top left quadrant indicates naïve cell phenotype; signal in top right quadrant indicates central memory (T_{CM}) phenotype; signal in bottom right quadrant indicates effector memory (T_{EM}) phenotype; and signal in bottom left quadrant indicates T_{EMRA}. CR stands for complete response. PD stands for progressive disease. VGPR stands for very good partial response.

[0448] FIGS. 30A and 30B are a pair of graphs showing CD4+ and CD8+ T cell subsets in apheresis samples acquired from MM patients (dots with slashes represent non-responders and white dots represent responders).

[0449] FIG. 31 is a graph showing treatment schema.

[0450] FIGS. 32A, 32B, and 32C are a set of graphs showing clinical outcomes. FIG. 32A is a Swimmer's plot showing best response and progression-free survival (PFS) for each subject. Arrow indicates ongoing response. FIG. 32B is a pair of PET/CT scan images for subject 03 showing resolution of extramedullary disease and malignant pleural effusion post-treatment. FIG. 32C is a Kaplan-Meier plot showing overall survival for Cohort 1. MR=minimal response; MRD=minimal residual disease; PR=partial response; PD=progressive disease; sCR=stringent complete response; SD=stable disease.

[0451] FIGS. 33A, 33B, and 33C are a set of graphs showing CART-BCMA expansion and persistence. FIG. 33A is a set of graphs depicting CART-BCMA cell levels over time in peripheral blood for each subject, as measured by flow cytometry (% CAR+ within CD3+ T cells, ▴, left axis) and quantitative PCR for CAR sequence (▪, right axis). See FIG. 38 for representative flow cytometry plots. FIG. 33B is a graph showing that peak CART-BCMA levels by qPCR correlate with response: median 102507 vs. 4187 copies/μg DNA for ≥PR vs. <PR, respectively (p=0.016, Mann-Whitney). FIG. 33C is a graph showing that AUC-28 (area under the curve for CART-BCMA levels by qPCR during first 28 days after infusion) correlates with response: median 885181 vs. 26183 (copies)×(days)/μg DNA for ≥PR vs. <PR, respectively (p=0.016, Mann-Whitney).

[0452] FIG. 34 is a set of graphs showing soluble BCMA (sBCMA), BAFF, APRIL levels and B cell frequency after CART-BCMA infusions. Peripheral blood serum levels of sBCMA, BAFF, and APRIL (ng/ml, left axis) were measured by ELISA pre- and post-CART-BCMA infusions for each subject as indicated above. Subjects with deepest clinical responses (01 (sCR), 03 (VGPR), 15 (VGPR)) had greatest declines in sBCMA and reciprocal increases in BAFF and APRIL. Peripheral blood B cell frequency (% CD19+ of CD45+CD14− gate, right axis) was assessed by flow cytometry at indicated time points.

[0453] FIG. 35 is a set of histograms showing BCMA expression by flow cytometry on gated MM cells in marrow aspirates for each subject, before and after CART-BCMA infusions. Hatched histograms show BCMA; filled histograms show FMO (fluorescence minus one) control. Post-infusion time point is Day 28, unless specified. Percentage of cells expressing BCMA as well as mean BCMA fluorescence intensity (MFI) for each subject are listed in Table 37. Note decreased BCMA expression for subject 03 at relapse (D164). See FIG. 42 for representative gating.

[0454] FIGS. 36A, 36B, 36C, and 36D are a set of graphs showing predictors of in vivo CART-BCMA expansion. The ratio of CD4+ to CD8+ T cells (CD4/CD8 ratio) within the apheresis product immediately after collection (FIG. 36A) and within the seed culture at start of manufacturing (i.e. following elutriation step to reduce monocyte contamination) (FIG. 36B) was determined by flow cytometry. In vitro fold expansion (FIG. 36C) was calculated from total cell counts at start and end of manufacturing. The proportion of CD8+ T cells within the apheresis product with a CD45RO−CD27+ phenotype was assessed by flow cytometry (FIG. 36D). The CD4/CD8 ratio and frequency of CD45RO−CD27+CD8+ T cells pre-manufacturing, and degree of in vitro expansion were associated with peak in vivo CART-BCMA expansion post-infusion (Spearman correlation r and p-value shown).

[0455] FIG. 37 is a CONSORT diagram showing subject enrollment.

[0456] FIG. 38 is a set of graphs showing representative gating and staining for CART-BCMA cells. Staining is shown for peripheral blood from subject 01, day +7 after first CART-BCMA infusion. Cells are gated by forward and side scatter, then singlets, then CD45+CD14− leukocytes, then T cells (CD3+CD19−). CART-BCMA+ cells were identified using biotinylated recombinant human BCMA-Fc and streptavidin-PE. Negative control was an FMO (fluorescence minus one) tube (lacking biotinylated BCMA-Fc) with streptavidin-PE. The % of CD3+ T cells expressing CART-BCMA was calculated by subtracting CAR+ cells in FMO tube from CAR+ cells in tube with biotinylated BCMA-FC (i.e. in this example 34.7−0.9=33.8). Activation status of CART-BCMA+ cells was identified by staining for HLA-DR (bottom right panel). The % of CAR+ cells that were activated at each time point was calculated by dividing % HLA-DR+ by (% HLA-DR+ plus % HLA-DR-) (i.e. in this example 32.9/(32.9+1.5)=95.6%).

[0457] FIG. 39 is a set of graphs showing absolute number of CART-BCMA+ T cells for each subject. Absolute # of CD3+CAR+ cells per μl of blood was estimated from the absolute lymphocyte count (ALC, reported from the clinical complete blood count (CBC) differential) and the CART-BCMA flow cytometry results (FIG. 38), using the following formula: (ALC) (% CD45+CD14−)(% CD3+CD19−) (% CAR+)/10000. For example, for subject 01 at day +7, ALC was 0.08×10³ cells/μl. Estimated absolute # of circulating CAR+ T cells at this time point is (0.08)(48.3)(72.1)(33.8)/10000=0.019×10³ cells/μ1.

[0458] FIG. 40 is a set of graphs showing serum cytokine changes after CART-BCMA treatment. Levels of 30 peripheral blood cytokines were assessed at multiple time points by Luminex assay. Changes in selected cytokines over first 28 days are depicted. Subjects with deepest responses (01, 03, 15) had greatest fold-increase in cytokines, typically at or just before peak CART-BCMA expansion.

[0459] FIGS. 41A and 41B are a pair of graphs showing baseline soluble BCMA (sBCMA) levels, peak expansion, and response. Peripheral blood serum levels of sBCMA were measured by ELISA pre-treatment. FIG. 41A is a graph showing that baseline sBCMA levels did not correlate significantly with peak expansion of CART-BCMA by qPCR (Spearman correlation r=0.43, p=0.25). FIG. 41B is a graph showing that baseline levels of sBCMA were not significantly associated with response (p=0.56, Mann-Whitney test).

[0460] FIG. 42 is a set of graphs showing representative gating for myeloma cells and BCMA staining. Bone marrow aspirate cells were gated by forward and side scatter, then by singlets, then on CD3−CD14− cells. Myeloma cells were identified by gating first on CD38^{hi} cells, then by gating on clonal plasma cells using CD19, CD56, and kappa/lambda staining. In this example, myeloma cells are CD19-CD56+kappa+. The % BCMA+ was determined using an FMO tube lacking anti-BCMA antibody.

[0461] FIGS. 43A and 43B are a pair of graphs showing baseline BCMA expression on MM cells, peak expansion, and response. BCMA mean fluorescence intensity (MFI) on myeloma cells pre-treatment did not correlate with peak CART-BCMA expansion by qPCR (Spearman correlation r=0.45, p=0.27) (FIG. 43A), nor was it significantly associated with response (p=0.25, Mann-Whitney test) (FIG. 43B). One subject (07) did not have a pre-treatment sample available.

[0462] FIGS. 44A and 44B are a set of graphs showing BCMA expression on B cell malignancy cell lines. FIG. 44A is a set of histograms showing the surface expression of BCMA on each cell line. Hatched histograms indicate staining with PE-labeled anti-BCMA antibody and filled histograms show the respective isotype control staining. In FIG. 44B, expression was quantified and the antibody binding capacity (ABC) plotted for each cell line tested.

[0463] FIG. 45A is a graph showing % CD27+CD45RO−CD8+ cells in the post-induction cohort and the relapsed/refractory cohort. FIG. 45B is a graph showing CD4/CD8 ratio in the post-induction cohort and the relapsed/refractory cohort. FIG. 45C is a graph showing in vitro population doublings by Day 9 in the post-induction cohort and the relapsed/refractory cohort.

[0464] FIG. 46 is a graph showing treatment schema. BM asp/Bx=bone marrow aspirate and biopsy; Cytoxan=cyclophosphamide; D=day; Lenti=lentivirus; Wk=week.

[0465] FIGS. 47A-47C are a panel of swimmer's plots showing best response and progression-free survival (PFS) for each subject in Cohort 1 (1-5×10⁸ CART-BCMA cells alone) (FIG. 47A), Cohort 2 (Cyclophosphamide (Cy)+1-5×10⁷ CART-BCMA cells) (FIG. 47B), and Cohort 3 (Cy+1-5×10⁸ CART-BCMA cells) (FIG. 47C). Arrow indicates ongoing response. FIG. 47D is a graph showing overall survival (OS) based on cohort, Kaplan-Meier plot. MR=minimal response; MRD=minimal residual disease; PR=partial response; PD=progressive disease; sCR=stringent complete response; SD=stable disease.

[0466] FIGS. 48A-48D are graphs showing CART-BCMA expansion and persistence. FIGS. 48A-48C are graphs showing CART-BCMA cell levels over time in peripheral blood for each cohort, as measured by quantitative PCR for CAR sequence. FIG. 48D is a graph showing peak CART-BCMA levels by qPCR for each subject (except subj. 34, for whom peak data not available). Median peak CART-BCMA levels (grey bars) were not significantly different between cohorts (Mann-Whitney).

[0467] FIGS. 49A-49I are graphs showing serum cytokines associated with CRS severity and neurotoxicity. Serum cytokine concentrations in pg/ml through day 28 were measured by Luminex assay. FIGS. 49A-49E: The median peak fold increase over baseline for each cytokine was compared between subjects with no cytokine release syndrome (CRS), grade 1 CRS, or grade 2 CRS not receiving tocilizumab (CRS gr 0-2) and those with grade 3-4 CRS or grade 2 CRS receiving tocilizumab (CRS Gr 3-4 or Gr 2+toci). The cytokines most significantly associated with CRS severity were IL-6 (FIG. 49A), IFN-γ (FIG. 49B), IL-2Rα (FIG. 49C), MIP-1α (FIG. 49D), and IL-15 (FIG. 49E). FIGS. 49F-49i: Median peak fold increase over baseline for each cytokine was compared between subjects with no neurotoxicity (No Ntx) and those with any grade of neurotoxicity (Any Ntx). The cytokines most significantly associated with neurotoxicity were IL-6 (FIG. 49F), IFN-γ (FIG. 49G), IL-1RA (FIG. 49H), and MIP-la (FIG. 49I). Stars depict subjects with grade 3-4 neurotoxicity. Exact p-value by Mann-Whitney test is shown. Horizontal lines depict medians. IFN-γ=interferon gamma; IL-1RA=interleukin 1 receptor antagonist; IL-2Rα=interleukin 2 receptor alpha; IL-6=interleukin 6; IL-15=interleukin 15. MIP-1α=macrophage inflammatory protein 1 alpha.

[0468] FIGS. 50A-50D are graphs showing soluble BCMA (sBCMA), BAFF, and APRIL concentration, and BCMA expression on MM cells pre- and post-CART-BCMA infusions. FIG. 50A: Baseline peripheral blood serum concentration of sBCMA and APRIL for subjects (sub) were significantly increased and decreased, respectively, compared to a panel of healthy donors (HD, n=6) (p=0.017, and <0.001, respectively, Mann-Whitney). Baseline BAFF concentrations were not significantly different. Median concentrations are depicted. FIG. 50B: Serial sBCMA concentrations decline after CART-BCMA infusions more significantly in hematologic responders (PR/VGPR/CR/sCR) than non-responders (MR/SD/PD). Mean concentration (ng/ml)+SEM are depicted. *p<0.05 by unpaired t-test. FIG. 50C: Representative examples of BCMA expression on MM cells by flow cytometry. See FIG. 42 for gating strategy. FMO=fluorescence minus one. FIG. 50D: BCMA mean fluorescence intensity (MFI) on MM cells over time in 18 subjects with evaluable serial bone marrow aspirates. Median MFI was significantly different between pre-treatment (pre-tx) and day 28 (D28) for responders (4000 vs. 944, p=0.02, paired t-test) but not for non-responders (2704 vs. 2140, p=0.19). Median MFI was not significantly different between pre-tx and day 90 (D90) for responders (4000 vs. 2022, p=0.26). *Subj. 15 had no detectable MM cells at D28. #Subj. 03 had no detectable MM cells at D45 (D28 not done) and too few MM cells to characterize at D90. D164 marrow is depicted at D90 time-point.

[0469] FIGS. 51A-51I are graphs showing predictors of in vivo CART-BCMA expansion and response. Peak blood CART-BCMA expansion, as measured by qPCR (FIG. 51A), as well as total CART-BCMA expansion over first 28 days (calculated as area under the curve (AUC)) (FIG. 51B), were both associated with clinical response. Greater peak CART-BCMA expansion (FIG. 51C) and response (FIG. 51D) were also associated with more severe CRS, defined as grade ¾ or grade 2 requiring tocilizumab. A higher ratio of CD4+ to CD8+ T cells (CD4/CD8 ratio) within the leukopheresis product, as determined by flow cytometry, also correlated with both peak expansion (FIG. 51E) and response (FIG. 51F), while in vitro proliferation, measured as fold increase of seeded cells during manufacturing, correlated only with peak expansion (FIG. 51G), but not response (p=0.54, Mann-Whitney test, data not shown). FIGS. 51H-I: A higher proportion of CD8+ T cells within the leukopheresis product with a CD45RO−CD27+ phenotype was significantly associated with peak CART-BCMA expansion (FIG. 51H), and to a lesser degree, response (FIG. 51I). For FIGS. 51A, 51B, 51C, 51F, and 51I, analysis was by Mann-Whitney test; lines represent median values. For FIG. 51D, analysis was by Fisher's exact test. For FIGS. 51E, 51G, and 51H, analysis was by Spearman correlation.

[0470] FIG. 52 is a CONSORT diagram showing subject enrollment. ALC=absolute lymphocyte count.

[0471] FIGS. 53A-53D are graphs showing additional clinical outcomes for treated subjects. FIG. 53A: Duration of response (DOR) for all subjects with partial response (PR) or better. FIG. 53B: Overall survival (OS) for all subjects. FIG. 53C: Progression-free survival (PFS) by cohort. FIG. 53D: PFS for all subjects. Curves derived by Kaplan-Meier method.

[0472] FIGS. 54A-54C are graphs showing expansion of CART-BCMA cells for Cohort 1 (FIG. 54A), Cohort 2 (FIG. 54B) or Cohort 3 (FIG. 54C). The frequency of CAR+ T cells within all peripheral blood CD3+ T cells, as measured by flow cytometry, is depicted for each subject.

[0473] FIG. 55 is a panel of graphs showing serum cytokine changes after CART-BCMA treatment. Concentrations (pg/ml) of peripheral blood cytokines were assessed at multiple time-points by Luminex assay. The peak fold increase over baseline for the most frequently elevated cytokines over first 28 days post-infusion are shown, based on cohort.

[0474] FIGS. 56A-56L are graphs showing that peak CART-BCMA expansion is not associated with baseline clinical characteristics, baseline BCMA expression or sBCMA concentration. Peak CART-BCMA level (copies/μg genomic DNA) by qPCR was not significantly associated with age at enrollment (above or below median) (FIG. 56A); years from diagnosis (above or below median) (FIG. 56B); presence of dell7p by FISH or TP53 mutation by sequencing (FIG. 56C); number (#) of therapeutic lines (above or below median) (FIG. 56D); being penta-refractory to 2 proteasome inhibitors (PIs), 2 immunomodulatory drugs (IMiDs) and daratumumab (dara) (FIG. 56E); receiving therapy just prior to leukapheresis that contained an IMiD (FIG. 56F), a PI (FIG. 56G), dara (FIG. 56H), or cyclophosphamide (Cytoxan) (FIG. 56I); percentage of pre-treatment bone marrow plasma cells (% BM PC) (FIG. 56J); baseline BCMA mean fluorescence intensity (MFI) on BM PC (FIG. 56K); or baseline serum soluble BCMA (sBCMA) concentration (FIG. 56L). For FIGS. 56A-56I, analysis by Mann-Whitney test; line represents median value. For FIGS. 56J-56L, analysis by Spearman correlation.

[0475] FIGS. 57A-57L are graphs showing that response is not associated with baseline clinical characteristics, baseline BCMA expression or sBCMA concentration. Clinical response (≥partial response (PR)) was not significantly associated with age at enrollment (FIG. 57A); years from diagnosis (FIG. 57B); presence of dell7p by FISH or TP53 mutation by sequencing (FIG. 57C); number (#) of therapeutic lines (FIG. 57D); being penta-refractory to 2 proteasome inhibitors (PIs), 2 immunomodulatory drugs (IMiDs) and daratumumab (dara) (FIG. 57E); receiving a regimen just prior to leukapheresis that contained an IMiD, a PI, dara, or cyclophosphamide (Cytoxan) (FIGS. 57F-57I); percentage of pre-treatment bone marrow plasma cells (% BM PC) (FIG. 57J); baseline BCMA mean fluorescence intensity (MFI) on BM PC (FIG. 57K); or baseline serum soluble BCMA (sBCMA) concentration (FIG. 57L). For FIGS. 57C, 57E-57I, analysis by Fisher Exact test. For FIGS. 57A, 57B, 57D, 57J-57L, analysis by Mann-Whitney test; line represents median value.

### DESCRIPTION

### Definitions

[0476] Unless defined otherwise, all technical and scientific terms used herein have the same meaning as commonly understood by one of ordinary skill in the art to which the invention pertains.

[0477] As used herein, the term “BCMA” refers to B-cell maturation antigen. BCMA (also known as TNFRSF17, BCM or CD269) is a member of the tumor necrosis receptor (TNFR) family and is predominantly expressed on terminally differentiated B cells, e.g., memory B cells, and plasma cells. Its ligand is called B-cell activator of the TNF family (BAFF) and a proliferation inducing ligand (APRIL). BCMA is involved in mediating the survival of plasma cells for mataining long-term humoral immunity. The gene for BCMA is encoded on chromosome 16 producing a primary mRNA transcript of 994 nucleotides in length (NCBI accession NM_001192.2) that encodes a protein of 184 amino acids (NP_001183.2). A second antisense transcript derived from the BCMA locus has been described, which may play a role in regulating BCMA expression. (Laabi Y. et al., Nucleic Acids Res., 1994, 22:1147-1154). Additional transcript variants have been described with unknown significance (Smirnova A S et al. Mol Immunol., 2008, 45(4):1179-1183. A second isoform, also known as TV4, has been identified (Uniprot identifier Q02223-2). As used herein, “BCMA” includes proteins comprising mutations, e.g., point mutations, fragments, insertions, deletions and splice variants of full length wild-type BCMA.

[0478] As used herein, the term “CD19” refers to the Cluster of Differentiation 19 protein, which is an antigenic determinant detectable on leukemia precursor cells. The human and murine amino acid and nucleic acid sequences can be found in a public database, such as GenBank, UniProt and Swiss-Prot. For example, the amino acid sequence of human CD19 can be found as UniProt/Swiss-Prot Accession No. P15391 and the nucleotide sequence encoding of the human CD19 can be found at Accession No. NM_001178098. As used herein, “CD19” includes proteins comprising mutations, e.g., point mutations, fragments, insertions, deletions and splice variants of full length wild-type CD19. CD19 is expressed on most B lineage cancers, including, e.g., acute lymphoblastic leukemia, chronic lymphocyte leukemia and non-Hodgkin lymphoma. Other cells with express CD19 are provided below in the definition of “disease associated with expression of CD19.” It is also an early marker of B cell progenitors. See, e.g., Nicholson et al. Mol. Immun 34 (16-17): 1157-1165 (1997). In one aspect the antigen-binding portion of the CART recognizes and binds an antigen within the extracellular domain of the CD19 protein. In one aspect, the CD19 protein is expressed on a cancer cell.

[0479] The term “a” and “an” refers to one or to more than one (i.e., to at least one) of the grammatical object of the article. By way of example, “an element” means one element or more than one element.

[0480] The term “about” when referring to a measurable value such as an amount, a temporal duration, and the like, is meant to encompass variations of ±20% or in some instances ±10%, or in some instances ±5%, or in some instances ±1%, or in some instances ±0.1% from the specified value, as such variations are appropriate to perform the disclosed methods.

[0481] The term “Chimeric Antigen Receptor” or alternatively a “CAR” refers to a recombinant polypeptide construct comprising at least an extracellular antigen binding domain, a transmembrane domain and a cytoplasmic signaling domain (also referred to herein as “an intracellular signaling domain”) comprising a functional signaling domain derived from a stimulatory molecule as defined below. In some embodiments, the domains in the CAR polypeptide construct are in the same polypeptide chain, e.g., comprise a chimeric fusion protein. In some embodiments, the domains in the CAR polypeptide construct are not contiguous with each other, e.g., are in different polypeptide chains, e.g., as provided in an RCAR as described herein.

[0482] In one aspect, the stimulatory molecule of the CAR is the zeta chain associated with the T cell receptor complex. In one aspect, the cytoplasmic signaling domain comprises a primary signaling domain (e.g., a primary signaling domain of CD3-zeta). In one aspect, the cytoplasmic signaling domain further comprises one or more functional signaling domains derived from at least one costimulatory molecule as defined below. In one aspect, the costimulatory molecule is chosen from 4 1BB (i.e., CD137), CD27, ICOS, and/or CD28. In one aspect, the CAR comprises a chimeric fusion protein comprising an extracellular antigen recognition domain, a transmembrane domain and an intracellular signaling domain comprising a functional signaling domain derived from a stimulatory molecule. In one aspect, the CAR comprises a chimeric fusion protein comprising an extracellular antigen recognition domain, a transmembrane domain and an intracellular signaling domain comprising a functional signaling domain derived from a co-stimulatory molecule and a functional signaling domain derived from a stimulatory molecule. In one aspect, the CAR comprises a chimeric fusion protein comprising an extracellular antigen recognition domain, a transmembrane domain and an intracellular signaling domain comprising two functional signaling domains derived from one or more co-stimulatory molecule(s) and a functional signaling domain derived from a stimulatory molecule. In one aspect, the CAR comprises a chimeric fusion protein comprising an extracellular antigen recognition domain, a transmembrane domain and an intracellular signaling domain comprising at least two functional signaling domains derived from one or more co-stimulatory molecule(s) and a functional signaling domain derived from a stimulatory molecule. In one aspect the CAR comprises an optional leader sequence at the amino-terminus (N-ter) of the CAR fusion protein. In one aspect, the CAR further comprises a leader sequence at the N-terminus of the extracellular antigen recognition domain, wherein the leader sequence is optionally cleaved from the antigen recognition domain (e.g., an scFv) during cellular processing and localization of the CAR to the cellular membrane.

[0483] A CAR that comprises an antigen binding domain (e.g., an scFv, a single domain antibody, or TCR (e.g., a TCR alpha binding domain or TCR beta binding domain)) that targets a specific tumor marker X, wherein X can be a tumor marker as described herein, is also referred to as XCAR. For example, a CAR that comprises an antigen binding domain that targets BCMA is referred to as BCMACAR. The CAR can be expressed in any cell, e.g., an immune effector cell as described herein (e.g., a T cell or an NK cell).

[0484] The term “signaling domain” refers to the functional portion of a protein which acts by transmitting information within the cell to regulate cellular activity via defined signaling pathways by generating second messengers or functioning as effectors by responding to such messengers.

[0485] The term “antibody,” as used herein, refers to a protein, or polypeptide sequence derived from an immunoglobulin molecule, which specifically binds with an antigen. Antibodies can be polyclonal or monoclonal, multiple or single chain, or intact immunoglobulins, and may be derived from natural sources or from recombinant sources. Antibodies can be tetramers of immunoglobulin molecules.

[0486] The term “antibody fragment” refers to at least one portion of an intact antibody, or recombinant variants thereof, and refers to the antigen binding domain, e.g., an antigenic determining variable region of an intact antibody, that is sufficient to confer recognition and specific binding of the antibody fragment to a target, such as an antigen. Examples of antibody fragments include, but are not limited to, Fab, Fab′, F(ab′)2, and Fv fragments, scFv antibody fragments, linear antibodies, single domain antibodies such as sdAb (either VL or VH), camelid VHH domains, and multi-specific molecules formed from antibody fragments such as a bivalent fragment comprising two or more, e.g., two, Fab fragments linked by a disulfide brudge at the hinge region, or two or more, e.g., two isolated CDR or other epitope binding fragments of an antibody linked. An antibody fragment can also be incorporated into single domain antibodies, maxibodies, minibodies, nanobodies, intrabodies, diabodies, triabodies, tetrabodies, v-NAR and bis-scFv (see, e.g., Hollinger and Hudson, Nature Biotechnology 23:1126-1136, 2005). Antibody fragments can also be grafted into scaffolds based on polypeptides such as a fibronectin type III (Fn3) (see U.S. Pat. No. 6,703,199, which describes fibronectin polypeptide minibodies).

[0487] The term “scFv” refers to a fusion protein comprising at least one antibody fragment comprising a variable region of a light chain and at least one antibody fragment comprising a variable region of a heavy chain, wherein the light and heavy chain variable regions are contiguously linked via a short flexible polypeptide linker, and capable of being expressed as a single chain polypeptide, and wherein the scFv retains the specificity of the intact antibody from which it is derived. Unless specified, as used herein an scFv may have the VL and VH variable regions in either order, e.g., with respect to the N-terminal and C-terminal ends of the polypeptide, the scFv may comprise VL-linker-VH or may comprise VH-linker-VL.

[0488] The terms “complementarity determining region” or “CDR,” as used herein, refer to the sequences of amino acids within antibody variable regions which confer antigen specificity and binding affinity. For example, in general, there are three CDRs in each heavy chain variable region (e.g., HCDR1, HCDR2, and HCDR3) and three CDRs in each light chain variable region (LCDR1, LCDR2, and LCDR3). The precise amino acid sequence boundaries of a given CDR can be determined using any of a number of well-known schemes, including those described by Kabat et al. (1991), “Sequences of Proteins of Immunological Interest,” 5th Ed. Public Health Service, National Institutes of Health, Bethesda, Md. (“Kabat” numbering scheme), Al-Lazikani et al., (1997) JMB 273,927-948 (“Chothia” numbering scheme), or a combination thereof. Under the Kabat numbering scheme, in some embodiments, the CDR amino acid residues in the heavy chain variable domain (VH) are numbered 31-35 (HCDR1), 50-65 (HCDR2), and 95-102 (HCDR3); and the CDR amino acid residues in the light chain variable domain (VL) are numbered 24-34 (LCDR1), 50-56 (LCDR2), and 89-97 (LCDR3). Under the Chothia numbering scheme, in some embodiments, the CDR amino acids in the VH are numbered 26-32 (HCDR1), 52-56 (HCDR2), and 95-102 (HCDR3); and the CDR amino acid residues in the VL are numbered 26-32 (LCDR1), 50-52 (LCDR2), and 91-96 (LCDR3). In a combined Kabat and Chothia numbering scheme, in some embodiments, the CDRs correspond to the amino acid residues that are part of a Kabat CDR, a Chothia CDR, or both. For instance, in some embodiments, the CDRs correspond to amino acid residues 26-35 (HCDR1), 50-65 (HCDR2), and 95-102 (HCDR3) in a VH, e.g., a mammalian VH, e.g., a human VH; and amino acid residues 24-34 (LCDR1), 50-56 (LCDR2), and 89-97 (LCDR3) in a VL, e.g., a mammalian VL, e.g., a human VL.

[0489] The portion of the CAR composition of the invention comprising an antibody or antibody fragment thereof may exist in a variety of forms, for example, where the antigen binding domain is expressed as part of a polypeptide chain including, for example, a single domain antibody fragment (sdAb), a single chain antibody (scFv), or e.g., a humanized antibody (Harlow et at, 1999, In: Using Antibodies: A Laboratory Manual, Cold Spring Harbor Laboratory Press, NY; Harlow et al., 1989, In: Antibodies: A Laboratory Manual, Cold Spring Harbor, N.Y.; Houston et al., 1988, Proc. Natl. Acad. Sci. USA 85:5879-5883; Bird et al., 1988, Science 242:423-426). In one aspect, the antigen binding domain of a CAR composition of the invention comprises an antibody fragment. In a further aspect, the CAR comprises an antibody fragment that comprises an scFv.

[0490] As used herein, the term “binding domain” or “antibody molecule” (also referred to herein as “anti-target (e.g., BCMA) binding domain”) refers to a protein, e.g., an immunoglobulin chain or fragment thereof, comprising at least one immunoglobulin variable domain sequence. The term “binding domain” or “antibody molecule” encompasses antibodies and antibody fragments. In an embodiment, an antibody molecule is a multispecific antibody molecule, e.g., it comprises a plurality of immunoglobulin variable domain sequences, wherein a first immunoglobulin variable domain sequence of the plurality has binding specificity for a first epitope and a second immunoglobulin variable domain sequence of the plurality has binding specificity for a second epitope. In an embodiment, a multispecific antibody molecule is a bispecific antibody molecule. A bispecific antibody has specificity for no more than two antigens. A bispecific antibody molecule is characterized by a first immunoglobulin variable domain sequence which has binding specificity for a first epitope and a second immunoglobulin variable domain sequence that has binding specificity for a second epitope. The term “antibody heavy chain,” refers to the larger of the two types of polypeptide chains present in antibody molecules in their naturally occurring conformations, and which normally determines the class to which the antibody belongs.

[0491] The term “antibody light chain,” refers to the smaller of the two types of polypeptide chains present in antibody molecules in their naturally occurring conformations. Kappa (κ) and lambda (λ) light chains refer to the two major antibody light chain isotypes.

[0492] The term “recombinant antibody” refers to an antibody which is generated using recombinant DNA technology, such as, for example, an antibody expressed by a bacteriophage or yeast expression system. The term should also be construed to mean an antibody which has been generated by the synthesis of a DNA molecule encoding the antibody and which DNA molecule expresses an antibody protein, or an amino acid sequence specifying the antibody, wherein the DNA or amino acid sequence has been obtained using recombinant DNA or amino acid sequence technology which is available and well known in the art.

[0493] The term “antigen” or “Ag” refers to a molecule that provokes an immune response. This immune response may involve either antibody production, or the activation of specific immunologically-competent cells, or both. The skilled artisan will understand that any macromolecule, including virtually all proteins or peptides, can serve as an antigen. Furthermore, antigens can be derived from recombinant or genomic DNA. A skilled artisan will understand that any DNA, which comprises a nucleotide sequences or a partial nucleotide sequence encoding a protein that elicits an immune response therefore encodes an “antigen” as that term is used herein. Furthermore, one skilled in the art will understand that an antigen need not be encoded solely by a full length nucleotide sequence of a gene. It is readily apparent that the present invention includes, but is not limited to, the use of partial nucleotide sequences of more than one gene and that these nucleotide sequences are arranged in various combinations to encode polypeptides that elicit the desired immune response. Moreover, a skilled artisan will understand that an antigen need not be encoded by a “gene” at all. It is readily apparent that an antigen can be generated synthesized or can be derived from a biological sample, or might be macromolecule besides a polypeptide. Such a biological sample can include, but is not limited to a tissue sample, a tumor sample, a cell or a fluid with other biological components.

[0494] The term “anti-tumor effect” refers to a biological effect which can be manifested by various means, including but not limited to, e.g., a decrease in tumor volume, a decrease in the number of tumor cells, a decrease in the number of metastases, an increase in life expectancy, decrease in tumor cell proliferation, decrease in tumor cell survival, or amelioration of various physiological symptoms associated with the cancerous condition. An “anti-tumor effect” can also be manifested by the ability of the peptides, polynucleotides, cells and antibodies of the invention in prevention of the occurrence of tumor in the first place.

[0495] The term “anti-cancer effect” refers to a biological effect which can be manifested by various means, including but not limited to, e.g., a decrease in tumor volume, a decrease in the number of cancer cells, a decrease in the number of metastases, an increase in life expectancy, decrease in cancer cell proliferation, decrease in cancer cell survival, or amelioration of various physiological symptoms associated with the cancerous condition. An “anti-cancer effect” can also be manifested by the ability of the peptides, polynucleotides, cells and antibodies in prevention of the occurrence of cancer in the first place. The term “anti-tumor effect” refers to a biological effect which can be manifested by various means, including but not limited to, e.g., a decrease in tumor volume, a decrease in the number of tumor cells, a decrease in tumor cell proliferation, or a decrease in tumor cell survival. The term “autologous” refers to any material derived from the same individual to whom it is later to be re-introduced into the individual.

[0496] The term “allogeneic” refers to any material derived from a different animal of the same species as the individual to whom the material is introduced. Two or more individuals are said to be allogeneic to one another when the genes at one or more loci are not identical. In some aspects, allogeneic material from individuals of the same species may be sufficiently unlike genetically to interact antigenically.

[0497] The term “xenogeneic” refers to a graft derived from an animal of a different species.

[0498] The term “apheresis” as used herein refers to the art-recognized extracorporeal process by which the blood of a donor or patient is removed from the donor or patient and passed through an apparatus that separates out selected particular constituent(s) and returns the remainder to the circulation of the donor or patient, e.g., by retransfusion. Thus, in the context of “an apheresis sample” refers to a sample obtained using apheresis.

[0499] The term “combination” refers to either a fixed combination in one dosage unit form, or a combined administration where a compound of the present invention and a combination partner (e.g. another drug as explained below, also referred to as “therapeutic agent” or “co-agent”) may be administered independently at the same time or separately within time intervals, especially where these time intervals allow that the combination partners show a cooperative, e.g. synergistic effect. The single components may be packaged in a kit or separately. One or both of the components (e.g., powders or liquids) may be reconstituted or diluted to a desired dose prior to administration. The terms “co-administration” or “combined administration” or the like as utilized herein are meant to encompass administration of the selected combination partner to a single subject in need thereof (e.g. a patient), and are intended to include treatment regimens in which the agents are not necessarily administered by the same route of administration or at the same time. The term “pharmaceutical combination” as used herein means a product that results from the mixing or combining of more than one active ingredient and includes both fixed and non-fixed combinations of the active ingredients. The term “fixed combination” means that the active ingredients, e.g. a compound of the present invention and a combination partner, are both administered to a patient simultaneously in the form of a single entity or dosage. The term “non-fixed combination” means that the active ingredients, e.g. a compound of the present invention and a combination partner, are both administered to a patient as separate entities either simultaneously, concurrently or sequentially with no specific time limits, wherein such administration provides therapeutically effective levels of the two compounds in the body of the patient. The latter also applies to cocktail therapy, e.g. the administration of three or more active ingredients.

[0500] The term “cancer” refers to a disease characterized by the rapid and uncontrolled growth of aberrant cells. Cancer cells can spread locally or through the bloodstream and lymphatic system to other parts of the body. Examples of various cancers are described herein and include but are not limited to, breast cancer, prostate cancer, ovarian cancer, cervical cancer, skin cancer, pancreatic cancer, colorectal cancer, renal cancer, liver cancer, brain cancer, lymphoma, leukemia, lung cancer and the like. Preferred cancers treated by the methods described herein include multiple myeloma, Hodgkin's lymphoma or non-Hodgkin's lymphoma.

[0501] The terms “tumor” and “cancer” are used interchangeably herein, e.g., both terms encompass solid and liquid, e.g., diffuse or circulating, tumors. As used herein, the term “cancer” or “tumor” includes premalignant, as well as malignant cancers and tumors.

[0502] “Derived from” as that term is used herein, indicates a relationship between a first and a second molecule. It generally refers to structural similarity between the first molecule and a second molecule and does not connotate or include a process or source limitation on a first molecule that is derived from a second molecule. For example, in the case of an intracellular signaling domain that is derived from a CD3zeta molecule, the intracellular signaling domain retains sufficient CD3zeta structure such that is has the required function, namely, the ability to generate a signal under the appropriate conditions. It does not connotate or include a limitation to a particular process of producing the intracellular signaling domain, e.g., it does not mean that, to provide the intracellular signaling domain, one must start with a CD3zeta sequence and delete unwanted sequence, or impose mutations, to arrive at the intracellular signaling domain.

[0503] The phrase “disease associated with expression of BCMA” includes, but is not limited to, a disease associated with a cell which expresses BCMA (e.g., wild-type or mutant BCMA) or condition associated with a cell which expresses BCMA (e.g., wild-type or mutant BCMA) including, e.g., proliferative diseases such as a cancer or malignancy or a precancerous condition such as a myelodysplasia, a myelodysplastic syndrome or a preleukemia; or a noncancer related indication associated with a cell which expresses BCMA (e.g., wild-type or mutant BCMA). For the avoidance of doubt, a disease associated with expression of BCMA may include a condition associated with a cell which does not presently express BCMA, e.g., because BCMA expression has been downregulated, e.g., due to treatment with a molecule targeting BCMA, e.g., a BCMA inhibitor described herein, but which at one time expressed BCMA. In one aspect, a cancer associated with expression of BCMA (e.g., wild-type or mutant BCMA) is a hematological cancer. In one aspect, the hematological cancer is a leukemia or a lymphoma. In one aspect, a cancer associated with expression of BCMA (e.g., wild-type or mutant BCMA) is a malignancy of differentiated plasma B cells. In one aspect, a cancer associated with expression of BCMA (e.g., wild-type or mutant BCMA) includes cancers and malignancies including, but not limited to, e.g., one or more acute leukemias including but not limited to, e.g., B-cell acute Lymphoid Leukemia (“BALL”), T-cell acute Lymphoid Leukemia (“TALL”), acute lymphoid leukemia (ALL); one or more chronic leukemias including but not limited to, e.g., chronic myelogenous leukemia (CML), Chronic Lymphoid Leukemia (CLL). Additional cancers or hematologic conditions associated with expression of BMCA (e.g., wild-type or mutant BCMA) comprise, but are not limited to, e.g., B cell prolymphocytic leukemia, blastic plasmacytoid dendritic cell neoplasm, Burkitt's lymphoma, diffuse large B cell lymphoma, Follicular lymphoma, Hairy cell leukemia, small cell- or a large cell-follicular lymphoma, malignant lymphoproliferative conditions, MALT lymphoma, mantle cell lymphoma, Marginal zone lymphoma, multiple myeloma, myelodysplasia and myelodysplastic syndrome, non-Hodgkin's lymphoma, plasmablastic lymphoma, plasmacytoid dendritic cell neoplasm, Waldenstrom macroglobulinemia, and “preleukemia” which are a diverse collection of hematological conditions united by ineffective production (or dysplasia) of myeloid blood cells, and the like. In some embodiments, the cancer is multiple myeloma, Hodgkin's lymphoma, non-Hodgkin's lymphoma, or glioblastoma. In embodiments, a disease associated with expression of BCMA includes a plasma cell proliferative disorder, e.g., asymptomatic myeloma (smoldering multiple myeloma or indolent myeloma), monoclonal gammapathy of undetermined significance (MGUS), Waldenstrom's macroglobulinemia, plasmacytomas (e.g., plasma cell dyscrasia, solitary myeloma, solitary plasmacytoma, extramedullary plasmacytoma, and multiple plasmacytoma), systemic amyloid light chain amyloidosis, and POEMS syndrome (also known as Crow-Fukase syndrome, Takatsuki disease, and PEP syndrome). Further diseases associated with expression of BCMA (e.g., wild-type or mutant BCMA) expression include, but not limited to, e.g., atypical and/or non-classical cancers, malignancies, precancerous conditions or proliferative diseases associated with expression of BCMA (e.g., wild-type or mutant BCMA), e.g., a cancer described herein, e.g., a prostate cancer (e.g., castrate-resistant or therapy-resistant prostate cancer, or metastatic prostate cancer), pancreatic cancer, or lung cancer.

[0504] Non-cancer related conditions that are associated with BCMA (e.g., wild-type or mutant BCMA) include viral infections; e.g., HIV, fungal infections, e.g., C. neoformans; autoimmune disease; e.g. rheumatoid arthritis, system lupus erythematosus (SLE or lupus), pemphigus vulgaris, and Sjogren's syndrome; inflammatory bowel disease, ulcerative colitis; transplant-related allospecific immunity disorders related to mucosal immunity; and unwanted immune responses towards biologics (e.g., Factor VIII) where humoral immunity is important. In embodiments, a non-cancer related indication associated with expression of BCMA includes but is not limited to, e.g., autoimmune disease, (e.g., lupus), inflammatory disorders (allergy and asthma) and transplantation. In some embodiments, the tumor antigen-expressing cell expresses, or at any time expressed, mRNA encoding the tumor antigen. In an embodiment, the tumor antigen-expressing cell produces the tumor antigen protein (e.g., wild-type or mutant), and the tumor antigen protein may be present at normal levels or reduced levels. In an embodiment, the tumor antigen-expressing cell produced detectable levels of a tumor antigen protein at one point, and subsequently produced substantially no detectable tumor antigen protein.

[0505] The term “conservative sequence modifications” refers to amino acid modifications that do not significantly affect or alter the binding characteristics of the antibody or antibody fragment containing the amino acid sequence. Such conservative modifications include amino acid substitutions, additions and deletions. Modifications can be introduced into an antibody or antibody fragment of the invention by standard techniques known in the art, such as site-directed mutagenesis and PCR-mediated mutagenesis. Conservative substitutions are ones in which the amino acid residue is replaced with an amino acid residue having a similar side chain Families of amino acid residues having similar side chains have been defined in the art. These families include amino acids with basic side chains (e.g., lysine, arginine, histidine), acidic side chains (e.g., aspartic acid, glutamic acid), uncharged polar side chains (e.g., glycine, asparagine, glutamine, serine, threonine, tyrosine, cysteine, tryptophan), nonpolar side chains (e.g., alanine, valine, leucine, isoleucine, proline, phenylalanine, methionine), beta-branched side chains (e.g., threonine, valine, isoleucine) and aromatic side chains (e.g., tyrosine, phenylalanine, tryptophan, histidine). Thus, one or more amino acid residues within a CAR of the invention can be replaced with other amino acid residues from the same side chain family and the altered CAR can be tested using the functional assays described herein.

[0506] The term “stimulation,” refers to a primary response induced by binding of a stimulatory molecule (e.g., a TCR/CD3 complex) with its cognate ligand thereby mediating a signal transduction event, such as, but not limited to, signal transduction via the TCR/CD3 complex. Stimulation can mediate altered expression of certain molecules, such as downregulation of TGF-β, and/or reorganization of cytoskeletal structures, and the like.

[0507] The term “stimulatory molecule,” refers to a molecule expressed by a T cell that provides the primary cytoplasmic signaling sequence(s) that regulate primary activation of the TCR complex in a stimulatory way for at least some aspect of the T cell signaling pathway. In some embodiments, the ITAM-containing domain within the CAR recapitulates the signaling of the primary TCR independently of endogenous TCR complexes. In one aspect, the primary signal is initiated by, for instance, binding of a TCR/CD3 complex with an MHC molecule loaded with peptide, and which leads to mediation of a T cell response, including, but not limited to, proliferation, activation, differentiation, and the like. A primary cytoplasmic signaling sequence (also referred to as a “primary signaling domain”) that acts in a stimulatory manner may contain a signaling motif which is known as immunoreceptor tyrosine-based activation motif or ITAM. Examples of an ITAM containing primary cytoplasmic signaling sequence that is of particular use in the invention includes, but is not limited to, those derived from TCR zeta, FcR gamma, FcR beta, CD3 gamma, CD3 delta, CD3 epsilon, CD5, CD22, CD79a, CD79b, CD278 (also known as “ICOS”), FccRI and CD66d, DAP10 and DAP12. In a specific CAR of the invention, the intracellular signaling domain in any one or more CARS of the invention comprises an intracellular signaling sequence, e.g., a primary signaling sequence of CD3-zeta. The term “antigen presenting cell” or “APC” refers to an immune system cell such as an accessory cell (e.g., a B-cell, a dendritic cell, and the like) that displays a foreign antigen complexed with major histocompatibility complexes (MHC's) on its surface. T-cells may recognize these complexes using their T-cell receptors (TCRs). APCs process antigens and present them to T-cells.

[0508] An “intracellular signaling domain,” as the term is used herein, refers to an intracellular portion of a molecule. In embodiments, the intracellular signal domain transduces the effector function signal and directs the cell to perform a specialized function. While the entire intracellular signaling domain can be employed, in many cases it is not necessary to use the entire chain. To the extent that a truncated portion of the intracellular signaling domain is used, such truncated portion may be used in place of the intact chain as long as it transduces the effector function signal. The term intracellular signaling domain is thus meant to include any truncated portion of the intracellular signaling domain sufficient to transduce the effector function signal.

[0509] The intracellular signaling domain generates a signal that promotes an immune effector function of the CAR containing cell, e.g., a CART cell. Examples of immune effector function, e.g., in a CART cell, include cytolytic activity and helper activity, including the secretion of cytokines.

[0510] In an embodiment, the intracellular signaling domain can comprise a primary intracellular signaling domain. Exemplary primary intracellular signaling domains include those derived from the molecules responsible for primary stimulation, or antigen dependent simulation. In an embodiment, the intracellular signaling domain can comprise a costimulatory intracellular domain. Exemplary costimulatory intracellular signaling domains include those derived from molecules responsible for costimulatory signals, or antigen independent stimulation. For example, in the case of a CART, a primary intracellular signaling domain can comprise a cytoplasmic sequence of a T cell receptor, and a costimulatory intracellular signaling domain can comprise cytoplasmic sequence from co-receptor or costimulatory molecule.

[0511] A primary intracellular signaling domain can comprise a signaling motif which is known as an immunoreceptor tyrosine-based activation motif or ITAM. Examples of ITAM containing primary cytoplasmic signaling sequences include, but are not limited to, those derived from CD3 zeta, FcR gamma, FcR beta, CD3 gamma, CD3 delta, CD3 epsilon, CD5, CD22, CD79a, CD79b, CD278 (also known as “ICOS”), FccRI, CD66d, DAP10 and DAP12.

[0512] The term “zeta” or alternatively “zeta chain”, “CD3-zeta” or “TCR-zeta” refers to CD247. Swiss-Prot accession number P20963 provides exemplary human CD3 zeta amino acid sequences. A “zeta stimulatory domain” or alternatively a “CD3-zeta stimulatory domain” or a “TCR-zeta stimulatory domain” refers to a stimulatory domain of CD3-zeta or a variant thereof (e.g., a molecule having mutations, e.g., point mutations, fragments, insertions, or deletions). In one embodiment, the cytoplasmic domain of zeta comprises residues 52 through 164 of GenBank Acc. No. BAG36664.1 or a variant thereof (e.g., a molecule having mutations, e.g., point mutations, fragments, insertions, or deletions). In one embodiment, the “zeta stimulatory domain” or a “CD3-zeta stimulatory domain” is the sequence provided as SEQ ID NO: 1027 or 1030 or a variant thereof (e.g., a molecule having mutations, e.g., point mutations, fragments, insertions, or deletions).

[0513] The term “costimulatory molecule” refers to the cognate binding partner on a T cell that specifically binds with a costimulatory ligand, thereby mediating a costimulatory response by the T cell, such as, but not limited to, proliferation. Costimulatory molecules are cell surface molecules other than antigen receptors or their ligands that are required for an efficient immune response. Costimulatory molecules include, but are not limited to an MHC class I molecule, TNF receptor proteins, Immunoglobulin-like proteins, cytokine receptors, integrins, signaling lymphocytic activation molecules (SLAM proteins), activating NK cell receptors, BTLA, Toll ligand receptor, OX40, CD2, CD7, CD27, CD28, CD30, CD40, CDS, ICAM-1, LFA-1 (CD11a/CD18), 4-1BB (CD137), B7-H3, CDS, ICAM-1, ICOS (CD278), GITR, BAFFR, LIGHT, HVEM (LIGHTR), KIRDS2, SLAMF7, NKp80 (KLRF1), NKp44, NKp30, NKp46, CD19, CD4, CD8alpha, CD8beta, IL2R beta, IL2R gamma, IL7R alpha, ITGA4, VLA1, CD49a, ITGA4, IA4, CD49D, ITGA6, VLA-6, CD49f, ITGAD, CD11d, ITGAE, CD103, ITGAL, CD11a, LFA-1, ITGAM, CD11b, ITGAX, CD11c, ITGB1, CD29, ITGB2, CD18, LFA-1, ITGB7, NKG2D, NKG2C, TNFR2, TRANCE/RANKL, DNAM1 (CD226), SLAMF4 (CD244, 2B4), CD84, CD96 (Tactile), CEACAM1, CRTAM, Ly9 (CD229), CD160 (BY55), PSGL1, CD100 (SEMA4D), CD69, SLAMF6 (NTB-A, Ly108), SLAM (SLAMF1, CD150, IPO-3), BLAME (SLAMF8), SELPLG (CD162), LTBR, LAT, GADS, SLP-76, PAG/Cbp, CD19a, and a ligand that specifically binds with CD83.

[0514] A costimulatory intracellular signaling domain refers to the intracellular portion of a costimulatory molecule.

[0515] The intracellular signaling domain can comprise the entire intracellular portion, or the entire native intracellular signaling domain, of the molecule from which it is derived, or a functional fragment thereof.

[0516] The term “4-1BB” refers to CD137 or Tumor necrosis factor receptor superfamily member 9. Swiss-Prot accession number P20963 provides exemplary human 4-1BB amino acid sequences. A “4-1BB costimulatory domain” refers to a costimulatory domain of 4-1BB, or a variant thereof (e.g., a molecule having mutations, e.g., point mutations, fragments, insertions, or deletions). In one embodiment, the “4-1BB costimulatory domain” is the sequence provided as SEQ ID NO: 1022 or a variant thereof (e.g., a molecule having mutations, e.g., point mutations, fragments, insertions, or deletions).

[0517] “Immune effector cell,” as that term is used herein, refers to a cell that is involved in an immune response, e.g., in the promotion of an immune effector response. Examples of immune effector cells include T cells, e.g., alpha/beta T cells and gamma/delta T cells, B cells, natural killer (NK) cells, natural killer T (NKT) cells, mast cells, and myeloic-derived phagocytes.

[0518] “Immune effector function or immune effector response,” as that term is used herein, refers to function or response, e.g., of an immune effector cell, that enhances or promotes an immune attack of a target cell. E.g., an immune effector function or response refers a property of a T or NK cell that promotes killing or the inhibition of growth or proliferation, of a target cell. In the case of a T cell, primary stimulation and co-stimulation are examples of immune effector function or response.

[0519] The term “effector function” refers to a specialized function of a cell. Effector function of a T cell, for example, may be cytolytic activity or helper activity including the secretion of cytokines.

[0520] The term “encoding” refers to the inherent property of specific sequences of nucleotides in a polynucleotide, such as a gene, a cDNA, or an mRNA, to serve as templates for synthesis of other polymers and macromolecules in biological processes having either a defined sequence of nucleotides (e.g., rRNA, tRNA and mRNA) or a defined sequence of amino acids and the biological properties resulting therefrom. Thus, a gene, cDNA, or RNA, encodes a protein if transcription and translation of mRNA corresponding to that gene produces the protein in a cell or other biological system. Both the coding strand, the nucleotide sequence of which is identical to the mRNA sequence and is usually provided in sequence listings, and the non-coding strand, used as the template for transcription of a gene or cDNA, can be referred to as encoding the protein or other product of that gene or cDNA.

[0521] Unless otherwise specified, a “nucleotide sequence encoding an amino acid sequence” includes all nucleotide sequences that are degenerate versions of each other and that encode the same amino acid sequence. The phrase nucleotide sequence that encodes a protein or a RNA may also include introns to the extent that the nucleotide sequence encoding the protein may in some version contain an intron(s).

[0522] The term “effective amount” or “therapeutically effective amount” are used interchangeably herein, and refer to an amount of a compound, formulation, material, or composition, as described herein effective to achieve a particular biological result.

[0523] The term “endogenous” refers to any material from or produced inside an organism, cell, tissue or system.

[0524] The term “exogenous” refers to any material introduced from or produced outside an organism, cell, tissue or system.

[0525] The term “expression” refers to the transcription and/or translation of a particular nucleotide sequence driven by a promoter.

[0526] The term “transfer vector” refers to a composition of matter which comprises an isolated nucleic acid and which can be used to deliver the isolated nucleic acid to the interior of a cell. Numerous vectors are known in the art including, but not limited to, linear polynucleotides, polynucleotides associated with ionic or amphiphilic compounds, plasmids, and viruses. Thus, the term “transfer vector” includes an autonomously replicating plasmid or a virus. The term should also be construed to further include non-plasmid and non-viral compounds which facilitate transfer of nucleic acid into cells, such as, for example, a polylysine compound, liposome, and the like. Examples of viral transfer vectors include, but are not limited to, adenoviral vectors, adeno-associated virus vectors, retroviral vectors, lentiviral vectors, and the like.

[0527] The term “expression vector” refers to a vector comprising a recombinant polynucleotide comprising expression control sequences operatively linked to a nucleotide sequence to be expressed. An expression vector comprises sufficient cis-acting elements for expression; other elements for expression can be supplied by the host cell or in an in vitro expression system. Expression vectors include all those known in the art, including cosmids, plasmids (e.g., naked or contained in liposomes) and viruses (e.g., lentiviruses, retroviruses, adenoviruses, and adeno-associated viruses) that incorporate the recombinant polynucleotide.

[0528] The term “lentivirus” refers to a genus of the Retroviridae family. Lentiviruses are unique among the retroviruses in being able to infect non-dividing cells; they can deliver a significant amount of genetic information into the DNA of the host cell, so they are one of the most efficient methods of a gene delivery vector. HIV, SIV, and FIV are all examples of lentiviruses.

[0529] The term “lentiviral vector” refers to a vector derived from at least a portion of a lentivirus genome, including especially a self-inactivating lentiviral vector as provided in Milone et al., Mol. Ther. 17(8): 1453-1464 (2009). Other examples of lentivirus vectors that may be used in the clinic, include but are not limited to, e.g., the LENTIVECTOR® gene delivery technology from Oxford BioMedica, the LENTIMAX™ vector system from Lentigen and the like. Nonclinical types of lentiviral vectors are also available and would be known to one skilled in the art.

[0530] The term “homologous” or “identity” refers to the subunit sequence identity between two polymeric molecules, e.g., between two nucleic acid molecules, such as, two DNA molecules or two RNA molecules, or between two polypeptide molecules. When a subunit position in both of the two molecules is occupied by the same monomeric subunit; e.g., if a position in each of two DNA molecules is occupied by adenine, then they are homologous or identical at that position. The homology between two sequences is a direct function of the number of matching or homologous positions; e.g., if half (e.g., five positions in a polymer ten subunits in length) of the positions in two sequences are homologous, the two sequences are 50% homologous; if 90% of the positions (e.g., 9 of 10), are matched or homologous, the two sequences are 90% homologous.

[0531] “Humanized” forms of non-human (e.g., murine) antibodies are chimeric immunoglobulins, immunoglobulin chains or fragments thereof (such as Fv, Fab, Fab′, F(ab′)2 or other antigen-binding subsequences of antibodies) which contain minimal sequence derived from non-human immunoglobulin. For the most part, humanized antibodies and antibody fragments thereof are human immunoglobulins (recipient antibody or antibody fragment) in which residues from a complementary-determining region (CDR) of the recipient are replaced by residues from a CDR of a non-human species (donor antibody) such as mouse, rat or rabbit having the desired specificity, affinity, and capacity. In some instances, Fv framework region (FR) residues of the human immunoglobulin are replaced by corresponding non-human residues. Furthermore, a humanized antibody/antibody fragment can comprise residues which are found neither in the recipient antibody nor in the imported CDR or framework sequences. These modifications can further refine and optimize antibody or antibody fragment performance. In general, the humanized antibody or antibody fragment thereof will comprise substantially all of at least one, and typically two, variable domains, in which all or substantially all of the CDR regions correspond to those of a non-human immunoglobulin and all or a significant portion of the FR regions are those of a human immunoglobulin sequence. The humanized antibody or antibody fragment can also comprise at least a portion of an immunoglobulin constant region (Fc), typically that of a human immunoglobulin. For further details, see Jones et al., Nature, 321: 522-525, 1986; Reichmann et al., Nature, 332: 323-329, 1988; Presta, Curr. Op. Struct. Biol., 2: 593-596, 1992.

[0532] “Fully human” refers to an immunoglobulin, such as an antibody or antibody fragment, where the whole molecule is of human origin or consists of an amino acid sequence identical to a human form of the antibody or immunoglobulin.

[0533] The term “isolated” means altered or removed from the natural state. For example, a nucleic acid or a peptide naturally present in a living animal is not “isolated,” but the same nucleic acid or peptide partially or completely separated from the coexisting materials of its natural state is “isolated.” An isolated nucleic acid or protein can exist in substantially purified form, or can exist in a non-native environment such as, for example, a host cell.

[0534] In the context of the present invention, the following abbreviations for the commonly occurring nucleic acid bases are used. “A” refers to adenosine, “C” refers to cytosine, “G” refers to guanosine, “T” refers to thymidine, and “U” refers to uridine.

[0535] The term “operably linked” or “transcriptional control” refers to functional linkage between a regulatory sequence and a heterologous nucleic acid sequence resulting in expression of the latter. For example, a first nucleic acid sequence is operably linked with a second nucleic acid sequence when the first nucleic acid sequence is placed in a functional relationship with the second nucleic acid sequence. For instance, a promoter is operably linked to a coding sequence if the promoter affects the transcription or expression of the coding sequence. Operably linked DNA sequences can be contiguous with each other and, e.g., where necessary to join two protein coding regions, are in the same reading frame.

[0536] The term “parenteral” administration of an immunogenic composition includes, e.g., subcutaneous (s.c.), intravenous (i.v.), intramuscular (i.m.), or intrasternal injection, intratumoral, or infusion techniques.

[0537] The term “nucleic acid” or “polynucleotide” refers to deoxyribonucleic acids (DNA) or ribonucleic acids (RNA) and polymers thereof in either single- or double-stranded form. Unless specifically limited, the term encompasses nucleic acids containing known analogues of natural nucleotides that have similar binding properties as the reference nucleic acid and are metabolized in a manner similar to naturally occurring nucleotides. Unless otherwise indicated, a particular nucleic acid sequence also implicitly encompasses conservatively modified variants thereof (e.g., degenerate codon substitutions, e.g., conservative substitutions), alleles, orthologs, SNPs, and complementary sequences as well as the sequence explicitly indicated. Specifically, degenerate codon substitutions, e.g., conservative substitutions may be achieved by generating sequences in which the third position of one or more selected (or all) codons is substituted with mixed-base and/or deoxyinosine residues (Batzer et al., Nucleic Acid Res. 19:5081 (1991); Ohtsuka et al., J. Biol. Chem. 260:2605-2608 (1985); and Rossolini et al., Mol. Cell. Probes 8:91-98 (1994)).

[0538] The terms “peptide,” “polypeptide,” and “protein” are used interchangeably, and refer to a compound comprised of amino acid residues covalently linked by peptide bonds. A protein or peptide must contain at least two amino acids, and no limitation is placed on the maximum number of amino acids that can comprise a protein's or peptide's sequence. Polypeptides include any peptide or protein comprising two or more amino acids joined to each other by peptide bonds. As used herein, the term refers to both short chains, which also commonly are referred to in the art as peptides, oligopeptides and oligomers, for example, and to longer chains, which generally are referred to in the art as proteins, of which there are many types. “Polypeptides” include, for example, biologically active fragments, substantially homologous polypeptides, oligopeptides, homodimers, heterodimers, variants of polypeptides, modified polypeptides, derivatives, analogs, fusion proteins, among others. A polypeptide includes a natural peptide, a recombinant peptide, or a combination thereof.

[0539] The term “promoter” refers to a DNA sequence recognized by the synthetic machinery of the cell, or introduced synthetic machinery, required to initiate the specific transcription of a polynucleotide sequence.

[0540] The term “promoter/regulatory sequence” refers to a nucleic acid sequence which is required for expression of a gene product operably linked to the promoter/regulatory sequence. In some instances, this sequence may be the core promoter sequence and in other instances, this sequence may also include an enhancer sequence and other regulatory elements which are required for expression of the gene product. The promoter/regulatory sequence may, for example, be one which expresses the gene product in a tissue specific manner

[0541] The term “constitutive” promoter refers to a nucleotide sequence which, when operably linked with a polynucleotide which encodes or specifies a gene product, causes the gene product to be produced in a cell under most or all physiological conditions of the cell.

[0542] The term “inducible” promoter refers to a nucleotide sequence which, when operably linked with a polynucleotide which encodes or specifies a gene product, causes the gene product to be produced in a cell substantially only when an inducer which corresponds to the promoter is present in the cell.

[0543] The term “tissue-specific” promoter refers to a nucleotide sequence which, when operably linked with a polynucleotide encodes or specified by a gene, causes the gene product to be produced in a cell substantially only if the cell is a cell of the tissue type corresponding to the promoter.

[0544] The terms “cancer associated antigen” or “tumor antigen” interchangeably refers to a molecule (typically a protein, carbohydrate or lipid) that is expressed on the surface of a cancer cell, either entirely or as a fragment (e.g., MHC/peptide), and which is useful for the preferential targeting of a pharmacological agent to the cancer cell. In some embodiments, a tumor antigen is a marker expressed by both normal cells and cancer cells, e.g., a lineage marker, e.g., CD19 on B cells. In some embodiments, a tumor antigen is a cell surface molecule that is overexpressed in a cancer cell in comparison to a normal cell, for instance, 1-fold over expression, 2-fold overexpression, 3-fold overexpression or more in comparison to a normal cell. In some embodiments, a tumor antigen is a cell surface molecule that is inappropriately synthesized in the cancer cell, for instance, a molecule that contains deletions, additions or mutations in comparison to the molecule expressed on a normal cell. In some embodiments, a tumor antigen will be expressed exclusively on the cell surface of a cancer cell, entirely or as a fragment (e.g., MHC/peptide), and not synthesized or expressed on the surface of a normal cell. In some embodiments, the CARs of the present invention includes CARs comprising an antigen binding domain (e.g., antibody or antibody fragment) that binds to a MHC presented peptide. Normally, peptides derived from endogenous proteins fill the pockets of Major histocompatibility complex (MHC) class I molecules, and are recognized by T cell receptors (TCRs) on CD8+ T lymphocytes. The MHC class I complexes are constitutively expressed by all nucleated cells. In cancer, virus-specific and/or tumor-specific peptide/MHC complexes represent a unique class of cell surface targets for immunotherapy. TCR-like antibodies targeting peptides derived from viral or tumor antigens in the context of human leukocyte antigen (HLA)-A1 or HLA-A2 have been described (see, e.g., Sastry et al., J Virol. 2011 85(5):1935-1942; Sergeeva et al., Blood, 2011 117(16):4262-4272; Verma et al., J Immunol 2010 184(4):2156-2165; Willemsen et al., Gene Ther 2001 8(21):1601-1608; Dao et al., Sci Transl Med 2013 5(176):176ra33; Tassev et al., Cancer Gene Ther 2012 19(2):84-100). For example, TCR-like antibody can be identified from screening a library, such as a human scFv phage displayed library.

[0545] The term “tumor-supporting antigen” or “cancer-supporting antigen” interchangeably refer to a molecule (typically a protein, carbohydrate or lipid) that is expressed on the surface of a cell that is, itself, not cancerous, but supports the cancer cells, e.g., by promoting their growth or survival e.g., resistance to immune cells. Exemplary cells of this type include stromal cells and myeloid-derived suppressor cells (MDSCs). The tumor-supporting antigen itself need not play a role in supporting the tumor cells so long as the antigen is present on a cell that supports cancer cells.

[0546] The term “flexible polypeptide linker” or “linker” as used in the context of an scFv refers to a peptide linker that consists of amino acids such as glycine and/or serine residues used alone or in combination, to link variable heavy and variable light chain regions together. In one embodiment, the flexible polypeptide linker is a Gly/Ser linker and comprises the amino acid sequence (Gly-Gly-Gly-Ser)n (SEQ ID NO: 1038), where n is a positive integer equal to or greater than 1. For example, n=1, n=2, n=3. n=4, n=5 and n=6, n=7, n=8, n=9 and n=10 In one embodiment, the flexible polypeptide linkers include, but are not limited to, (Gly4 Ser)4 (SEQ ID NO: 1039) or (Gly4 Ser)3 (SEQ ID NO: 1040). In another embodiment, the linkers include multiple repeats of (Gly2Ser), (GlySer) or (Gly3Ser) (SEQ ID NO: 1041). Also included within the scope of the invention are linkers described in WO2012/138475, incorporated herein by reference.

[0547] As used herein, a 5′ cap (also termed an RNA cap, an RNA 7-methylguanosine cap or an RNA m7G cap) is a modified guanine nucleotide that has been added to the “front” or 5′ end of a eukaryotic messenger RNA shortly after the start of transcription. The 5′ cap consists of a terminal group which is linked to the first transcribed nucleotide. Its presence is critical for recognition by the ribosome and protection from RNases. Cap addition is coupled to transcription, and occurs co-transcriptionally, such that each influences the other. Shortly after the start of transcription, the 5′ end of the mRNA being synthesized is bound by a cap-synthesizing complex associated with RNA polymerase. This enzymatic complex catalyzes the chemical reactions that are required for mRNA capping. Synthesis proceeds as a multi-step biochemical reaction. The capping moiety can be modified to modulate functionality of mRNA such as its stability or efficiency of translation.

[0548] As used herein, “in vitro transcribed RNA” refers to RNA, preferably mRNA, that has been synthesized in vitro. Generally, the in vitro transcribed RNA is generated from an in vitro transcription vector. The in vitro transcription vector comprises a template that is used to generate the in vitro transcribed RNA.

[0549] As used herein, a “poly(A)” is a series of adenosines attached by polyadenylation to the mRNA. In the preferred embodiment of a construct for transient expression, the polyA is between 50 and 5000 (SEQ ID NO: 1043), preferably greater than 64, more preferably greater than 100, most preferably greater than 300 or 400 (SEQ ID NO: 2024). poly(A) sequences can be modified chemically or enzymatically to modulate mRNA functionality such as localization, stability or efficiency of translation.

[0550] As used herein, “polyadenylation” refers to the covalent linkage of a polyadenylyl moiety, or its modified variant, to a messenger RNA molecule. In eukaryotic organisms, most messenger RNA (mRNA) molecules are polyadenylated at the 3′ end. The 3′ poly(A) tail is a long sequence of adenine nucleotides (often several hundred) added to the pre-mRNA through the action of an enzyme, polyadenylate polymerase. In higher eukaryotes, the poly(A) tail is added onto transcripts that contain a specific sequence, the polyadenylation signal. The poly(A) tail and the protein bound to it aid in protecting mRNA from degradation by exonucleases. Polyadenylation is also important for transcription termination, export of the mRNA from the nucleus, and translation. Polyadenylation occurs in the nucleus immediately after transcription of DNA into RNA, but additionally can also occur later in the cytoplasm. After transcription has been terminated, the mRNA chain is cleaved through the action of an endonuclease complex associated with RNA polymerase. The cleavage site is usually characterized by the presence of the base sequence AAUAAA near the cleavage site. After the mRNA has been cleaved, adenosine residues are added to the free 3′ end at the cleavage site.

[0551] As used herein, “transient” refers to expression of a non-integrated transgene for a period of hours, days or weeks, wherein the period of time of expression is less than the period of time for expression of the gene if integrated into the genome or contained within a stable plasmid replicon in the host cell.

[0552] As used herein, the terms “treat”, “treatment” and “treating” refer to the reduction or amelioration of the progression, severity and/or duration of a proliferative disorder, or the amelioration of one or more symptoms (preferably, one or more discernible symptoms) of a proliferative disorder resulting from the administration of one or more therapies (e.g., one or more therapeutic agents such as a CAR of the invention). In specific embodiments, the terms “treat”, “treatment” and “treating” refer to the amelioration of at least one measurable physical parameter of a proliferative disorder, such as growth of a tumor, not necessarily discernible by the patient. In other embodiments the terms “treat”, “treatment” and “treating”-refer to the inhibition of the progression of a proliferative disorder, either physically by, e.g., stabilization of a discernible symptom, physiologically by, e.g., stabilization of a physical parameter, or both. In other embodiments the terms “treat”, “treatment” and “treating” refer to the reduction or stabilization of tumor size or cancerous cell count.

[0553] The term “signal transduction pathway” refers to the biochemical relationship between a variety of signal transduction molecules that play a role in the transmission of a signal from one portion of a cell to another portion of a cell. The phrase “cell surface receptor” includes molecules and complexes of molecules capable of receiving a signal and transmitting signal across the membrane of a cell.

[0554] The term “subject” is intended to include living organisms in which an immune response can be elicited (e.g., mammals, human).

[0555] The term, a “substantially purified” cell refers to a cell that is essentially free of other cell types. A substantially purified cell also refers to a cell which has been separated from other cell types with which it is normally associated in its naturally occurring state. In some instances, a population of substantially purified cells refers to a homogenous population of cells. In other instances, this term refers simply to cell that have been separated from the cells with which they are naturally associated in their natural state. In some aspects, the cells are cultured in vitro. In other aspects, the cells are not cultured in vitro.

[0556] The term “therapeutic” as used herein means a treatment. A therapeutic effect is obtained by reduction, suppression, remission, or eradication of a disease state.

[0557] The term “prophylaxis” as used herein means the prevention of or protective treatment for a disease or disease state.

[0558] In the context of the present invention, “tumor antigen” or “hyperproliferative disorder antigen” or “antigen associated with a hyperproliferative disorder” refers to antigens that are common to specific hyperproliferative disorders. In certain aspects, the hyperproliferative disorder antigens of the present invention are derived from, cancers including but not limited to primary or metastatic melanoma, thymoma, lymphoma, sarcoma, lung cancer, liver cancer, non-Hodgkin lymphoma, Hodgkin lymphoma, leukemias, uterine cancer, cervical cancer, bladder cancer, kidney cancer and adenocarcinomas such as breast cancer, prostate cancer (e.g., castrate-resistant or therapy-resistant prostate cancer, or metastatic prostate cancer), ovarian cancer, pancreatic cancer, and the like, or a plasma cell proliferative disorder, e.g., asymptomatic myeloma (smoldering multiple myeloma or indolent myeloma), monoclonal gammapathy of undetermined significance (MGUS), Waldenstrom's macroglobulinemia, plasmacytomas (e.g., plasma cell dyscrasia, solitary myeloma, solitary plasmacytoma, extramedullary plasmacytoma, and multiple plasmacytoma), systemic amyloid light chain amyloidosis, and POEMS syndrome (also known as Crow-Fukase syndrome, Takatsuki disease, and PEP syndrome).

[0559] The term “transfected” or “transformed” or “transduced” refers to a process by which exogenous nucleic acid is transferred or introduced into the host cell. A “transfected” or “transformed” or “transduced” cell is one which has been transfected, transformed or transduced with exogenous nucleic acid. The cell includes the primary subject cell and its progeny.

[0560] The term “specifically binds,” refers to an antibody, or a ligand, which recognizes and binds with a cognate binding partner (e.g., a stimulatory and/or costimulatory molecule present on a T cell) protein present in a sample, but which antibody or ligand does not substantially recognize or bind other molecules in the sample.

[0561] “Regulatable chimeric antigen receptor (RCAR),” as used herein, refers to a set of polypeptides, typically two in the simplest embodiments, which when in an immune effector cell, provides the cell with specificity for a target cell, typically a cancer cell, and with intracellular signal generation. In some embodiments, an RCAR comprises at least an extracellular antigen binding domain, a transmembrane domain and a cytoplasmic signaling domain (also referred to herein as “an intracellular signaling domain”) comprising a functional signaling domain derived from a stimulatory molecule and/or costimulatory molecule as defined herein in the context of a CAR molecule. In some embodiments, the set of polypeptides in the RCAR are not contiguous with each other, e.g., are in different polypeptide chains. In some embodiments, the RCAR includes a dimerization switch that, upon the presence of a dimerization molecule, can couple the polypeptides to one another, e.g., can couple an antigen binding domain to an intracellular signaling domain. In some embodiments, the RCAR is expressed in a cell (e.g., an immune effector cell) as described herein, e.g., an RCAR-expressing cell (also referred to herein as “RCARX cell”). In an embodiment the RCARX cell is a T cell, and is referred to as a RCART cell. In an embodiment the RCARX cell is an NK cell, and is referred to as a RCARN cell. The RCAR can provide the RCAR-expressing cell with specificity for a target cell, typically a cancer cell, and with regulatable intracellular signal generation or proliferation, which can optimize an immune effector property of the RCAR-expressing cell. In embodiments, an RCAR cell relies at least in part, on an antigen binding domain to provide specificity to a target cell that comprises the antigen bound by the antigen binding domain

[0562] “Membrane anchor” or “membrane tethering domain”, as that term is used herein, refers to a polypeptide or moiety, e.g., a myristoyl group, sufficient to anchor an extracellular or intracellular domain to the plasma membrane.

[0563] “Switch domain,” as that term is used herein, e.g., when referring to an RCAR, refers to an entity, typically a polypeptide-based entity, that, in the presence of a dimerization molecule, associates with another switch domain. The association results in a functional coupling of a first entity linked to, e.g., fused to, a first switch domain, and a second entity linked to, e.g., fused to, a second switch domain A first and second switch domain are collectively referred to as a dimerization switch. In embodiments, the first and second switch domains are the same as one another, e.g., they are polypeptides having the same primary amino acid sequence, and are referred to collectively as a homodimerization switch. In embodiments, the first and second switch domains are different from one another, e.g., they are polypeptides having different primary amino acid sequences, and are referred to collectively as a heterodimerization switch. In embodiments, the switch is intracellular. In embodiments, the switch is extracellular. In embodiments, the switch domain is a polypeptide-based entity, e.g., FKBP or FRB-based, and the dimerization molecule is small molecule, e.g., a rapalogue. In embodiments, the switch domain is a polypeptide-based entity, e.g., an scFv that binds a myc peptide, and the dimerization molecule is a polypeptide, a fragment thereof, or a multimer of a polypeptide, e.g., a myc ligand or multimers of a myc ligand that bind to one or more myc scFvs. In embodiments, the switch domain is a polypeptide-based entity, e.g., myc receptor, and the dimerization molecule is an antibody or fragments thereof, e.g., myc antibody.

[0564] “Dimerization molecule,” as that term is used herein, e.g., when referring to an RCAR, refers to a molecule that promotes the association of a first switch domain with a second switch domain. In embodiments, the dimerization molecule does not naturally occur in the subject, or does not occur in concentrations that would result in significant dimerization. In embodiments, the dimerization molecule is a small molecule, e.g., rapamycin or a rapalogue, e.g, RAD001.

[0565] The term “bioequivalent” refers to an amount of an agent other than the reference compound (e.g., RAD001), required to produce an effect equivalent to the effect produced by the reference dose or reference amount of the reference compound (e.g., RAD001). In an embodiment the effect is the level of mTOR inhibition, e.g., as measured by P70 S6 kinase inhibition, e.g., as evaluated in an in vivo or in vitro assay, e.g., as measured by an assay described herein, e.g., the Boulay assay, or measurement of phosphorylated S6 levels by western blot. In an embodiment, the effect is alteration of the ratio of PD-1 positive/PD-1 negative T cells, as measured by cell sorting. In an embodiment a bioequivalent amount or dose of an mTOR inhibitor is the amount or dose that achieves the same level of P70 S6 kinase inhibition as does the reference dose or reference amount of a reference compound. In an embodiment, a bioequivalent amount or dose of an mTOR inhibitor is the amount or dose that achieves the same level of alteration in the ratio of PD-1 positive/PD-1 negative T cells as does the reference dose or reference amount of a reference compound.

[0566] The term “low, immune enhancing, dose” when used in conjunction with an mTOR inhibitor, e.g., an allosteric mTOR inhibitor, e.g., RAD001 or rapamycin, or a catalytic mTOR inhibitor, refers to a dose of mTOR inhibitor that partially, but not fully, inhibits mTOR activity, e.g., as measured by the inhibition of P70 S6 kinase activity. Methods for evaluating mTOR activity, e.g., by inhibition of P70 S6 kinase, are discussed herein. The dose is insufficient to result in complete immune suppression but is sufficient to enhance the immune response. In an embodiment, the low, immune enhancing, dose of mTOR inhibitor results in a decrease in the number of PD-1 positive immune effector cells, e.g., T cells or NK cells, and/or an increase in the number of PD-1 negative immune effector cells, e.g., T cells or NK cells, or an increase in the ratio of PD-1 negative immune effector cells (e.g., T cells or NK cells)/PD-1 positive immune effector cells (e.g., T cells or NK cells).

[0567] In an embodiment, the low, immune enhancing, dose of mTOR inhibitor results in an increase in the number of naive T cells. In an embodiment, the low, immune enhancing, dose of mTOR inhibitor results in one or more of the following:

[0568] an increase in the expression of one or more of the following markers: CD62Lhigh, CD127high, CD27+, and BCL2, e.g., on memory T cells, e.g., memory T cell precursors;

[0569] a decrease in the expression of KLRG1, e.g., on memory T cells, e.g., memory T cell precursors; and

[0570] an increase in the number of memory T cell precursors, e.g., cells with any one or combination of the following characteristics: increased CD62Lhigh, increased CD127high, increased CD27+, decreased KLRG1, and increased BCL2;

[0571] wherein any of the changes described above occurs, e.g., at least transiently, e.g., as compared to a non-treated subject.

[0572] “Refractory” as used herein refers to a disease, e.g., cancer, that does not respond to a treatment. In embodiments, a refractory cancer can be resistant to a treatment before or at the beginning of the treatment. In other embodiments, the refractory cancer can become resistant during a treatment. A refractory cancer is also called a resistant cancer.

[0573] “Relapsed” or a “relapse” as used herein refers to the reappearance of a disease (e.g., cancer) or the signs and symptoms of a disease such as cancer after a period of improvement or responsiveness, e.g., after prior treatment of a therapy, e.g., cancer therapy. For example, the period of responsiveness may involve the level of cancer cells falling below a certain threshold, e.g., below 20%, 15%, 10%, 5%, 4%, 3%, 2%, or 1%. The reappearance may involve the level of cancer cells rising above a certain threshold, e.g., above 20%, 15%, 10%, 5%, 4%, 3%, 2%, or 1%.

[0574] In one aspect, a “responder” of a therapy can be a subject having complete response, very good partial response, or partial response after receiving the therapy. In one aspect, a “non-responder” of a therapy can be a subject having minor response, stable disease, or progressive disease after receiving the therapy. In some embodiments, the subject has multiple myeloma and the response of the subject to a multiple myeloma therapy is determined based on IMWG 2016 criteria, e.g., as disclosed in Kumar, et al., Lancet Oncol. 17, e328-346 (2016), hereby incorporated herein by reference in its entirety, e.g., as described in Table 7.

[0575] Ranges: throughout this disclosure, various aspects of the invention can be presented in a range format. It should be understood that the description in range format is merely for convenience and brevity and should not be construed as an inflexible limitation on the scope of the invention. Accordingly, the description of a range should be considered to have specifically disclosed all the possible subranges as well as individual numerical values within that range. For example, description of a range such as from 1 to 6 should be considered to have specifically disclosed subranges such as from 1 to 3, from 1 to 4, from 1 to 5, from 2 to 4, from 2 to 6, from 3 to 6 etc., as well as individual numbers within that range, for example, 1, 2, 2.7, 3, 4, 5, 5.3, and 6. As another example, a range such as 95-99% identity, includes something with 95%, 96%, 97%, 98% or 99% identity, and includes subranges such as 96-99%, 96-98%, 96-97%, 97-99%, 97-98% and 98-99% identity. This applies regardless of the breadth of the range.

[0576] A “gene editing system” as the term is used herein, refers to a system, e.g., one or more molecules, that direct and effect an alteration, e.g., a deletion, of one or more nucleic acids at or near a site of genomic DNA targeted by said system. Gene editing systems are known in the art, and are described more fully below.

[0577] Definitions of specific functional groups and chemical terms are described in more detail below. The chemical elements are identified in accordance with the Periodic Table of the Elements, CAS version, Handbook of Chemistry and Physics, 75^{th} Ed., inside cover, and specific functional groups are generally defined as described therein. Additionally, general principles of organic chemistry, as well as specific functional moieties and reactivity, are described in Thomas Sorrell, Organic Chemistry, University Science Books, Sausalito, 1999; Smith and March, March's Advanced Organic Chemistry, 5^{th} Edition, John Wiley & Sons, Inc., New York, 2001; Larock, Comprehensive Organic Transformations, VCH Publishers, Inc., New York, 1989; and Carruthers, Some Modern Methods of Organic Synthesis, 3^{rd} Edition, Cambridge University Press, Cambridge, 1987.

[0578] The term “alkyl,” as used herein, refers to a monovalent saturated, straight- or branched-chain hydrocarbon such as a straight or branched group of 1-12, 1-10, or 1-6 carbon atoms, referred to herein as C₁-C₁₂alkyl, C₁-C₁₀ alkyl, and C₁-C₆ alkyl, respectively. Examples of alkyl groups include, but are not limited to, methyl, ethyl, n-propyl, isopropyl, n-butyl, iso-butyl, sec-butyl, sec-pentyl, iso-pentyl, tert-butyl, n-pentyl, neopentyl, n-hexyl, sec-hexyl, and the like.

[0579] The terms “alkenyl” and “alkynyl” as used herein refer to unsaturated aliphatic groups analogous in length and possible substitution to the alkyls described above, but that contain at least one double or triple bond, respectively. Exemplary alkenyl groups include, but are not limited to, —CH═CH₂ and —CH₂CH═CH₂.

[0580] The term “aryl” as used herein refers to a monocyclic, bicyclic or polycyclic hydrocarbon ring system, wherein at least one ring is aromatic. Representative aryl groups include fully aromatic ring systems, such as phenyl (e.g., (C₆) aryl), naphthyl (e.g., (C₁₀) aryl), and anthracenyl (e.g., (C₁₄) aryl), and ring systems where an aromatic carbon ring is fused to one or more non-aromatic carbon rings, such as indanyl, phthalimidyl, naphthimidyl, or tetrahydronaphthyl, and the like.

[0581] The term “carbocyclyl” as used herein refers to monocyclic, or fused, spiro-fused, and/or bridged bicyclic or polycyclic hydrocarbon ring system containing 3-18 carbon atoms, wherein each ring is either completely saturated or contains one or more units of unsaturation, but where no ring is aromatic. Representative carbocyclyl groups include cycloalkyl groups (e.g., cyclopentyl, cyclobutyl, cyclopentyl, cyclohexyl and the like), and cycloalkenyl groups (e.g., cyclopentenyl, cyclohexenyl, cyclopentadienyl, and the like).

[0582] The term “carbonyl” as used herein refers to —C═O.

[0583] The term “cyano” as used herein refers to —CN.

[0584] The terms “halo” or “halogen” as used herein refer to fluorine (fluoro, —F), chlorine (chloro, —Cl), bromine (bromo, —Br), or iodine (iodo, —I).

[0585] The term “heteroalkyl” as used herein refers to a monovalent saturated straight or branched alkyl chain wherein at least one carbon atom in the chain is replaced with a heteroatom, such as O, S, or N, provided that upon substitution, the chain comprises at least one carbon atom. In some embodiments, a heteroalkyl group may comprise, e.g., 1-12, 1-10, or 1-6 carbon atoms, referred to herein as C₁-C₁₂ heteroalkyl, heteroalkyl, and C₁-C₆heteroalkyl. In certain instances, a heteroalkyl group comprises 1, 2, 3, or 4 independently selected heteroatoms in place of 1, 2, 3, or 4 individual carbon atoms in the alkyl chain. Representative heteroalkyl groups include —CH₂NHC(O)CH₃, —CH₂CH₂OCH₃, —CH₂CH₂NHCH₃, —CH₂CH₂N(CH₃)CH₃, and the like.

[0586] The term “heteroaryl” as used herein refers to a monocyclic, bicyclic or polycyclic ring system wherein at least one ring is both aromatic and comprises a heteroatom; and wherein no other rings are heterocyclyl (as defined below). Representative heteroaryl groups include ring systems where (i) each ring comprises a heteroatom and is aromatic, e.g., imidazolyl, oxazolyl, thiazolyl, triazolyl, pyrrolyl, furanyl, thiophenyl pyrazolyl, pyridinyl, pyrazinyl, pyridazinyl, pyrimidinyl, indolizinyl, purinyl, naphthyridinyl, and pteridinyl; (ii) each ring is aromatic or carbocyclyl, at least one aromatic ring comprises a heteroatom and at least one other ring is a hydrocarbon ring or e.g., indolyl, isoindolyl, benzothienyl, benzofuranyl, dibenzofuranyl, indazolyl, benzimidazolyl, benzthiazolyl, quinolyl, isoquinolyl, cinnolinyl, phthalazinyl, quinazolinyl, quinoxalinyl, carbazolyl, acridinyl, phenazinyl, phenothiazinyl, phenoxazinyl, pyrido[2,3-b]-1,4-oxazin-3(4H)-one, thiazolo-[4,5-c]-pyridinyl, 4,5,6,7-tetrahydrothieno[2,3-c]pyridinyl, 5,6-dihydro-4H-thieno[2,3-c]pyrrolyl, 4,5,6,7,8-tetrahydroquinolinyl and 5,6,7,8-tetrahydroisoquinolinyl; and (iii) each ring is aromatic or carbocyclyl, and at least one aromatic ring shares a bridgehead heteroatom with another aromatic ring, e.g., 4H-quinolizinyl. In certain embodiments, the heteroaryl is a monocyclic or bicyclic ring, wherein each of said rings contains 5 or 6 ring atoms where 1, 2, 3, or 4 of said ring atoms are a heteroatom independently selected from N, O, and S.

[0587] The term “heterocyclyl” as used herein refers to a monocyclic, or fused, spiro-fused, and/or bridged bicyclic and polycyclic ring systems where at least one ring is saturated or partially unsaturated (but not aromatic) and comprises a heteroatom. A heterocyclyl can be attached to its pendant group at any heteroatom or carbon atom that results in a stable structure and any of the ring atoms can be optionally substituted. Representative heterocyclyls include ring systems in which (i) every ring is non-aromatic and at least one ring comprises a heteroatom, e.g., tetrahydrofuranyl, tetrahydrothienyl, pyrrolidinyl, pyrrolidonyl, piperidinyl, pyrrolinyl, decahydroquinolinyl, oxazolidinyl, piperazinyl, dioxanyl, dioxolanyl, diazepinyl, oxazepinyl, thiazepinyl, morpholinyl, and quinuclidinyl; (ii) at least one ring is non-aromatic and comprises a heteroatom and at least one other ring is an aromatic carbon ring, e.g., 1,2,3,4-tetrahydroquinolinyl; and (iii) at least one ring is non-aromatic and comprises a heteroatom and at least one other ring is aromatic and comprises a heteroatom, e.g., 3,4-dihydro-1H-pyrano[4,3-c]pyridinyl, and 1,2,3,4-tetrahydro-2,6-naphthyridinyl. In certain embodiments, the heterocyclyl is a monocyclic or bicyclic ring, wherein each of said rings contains 3-7 ring atoms where 1, 2, 3, or 4 of said ring atoms are a heteroatom independently selected from N, O, and S.

[0588] As described herein, compounds of the invention may contain “optionally substituted” moieties. In general, the term “substituted”, whether preceded by the term “optionally” or not, means that one or more hydrogens of the designated moiety are replaced with a suitable substituent. Unless otherwise indicated, an “optionally substituted” group may have a suitable substituent at each substitutable position of the group, and when more than one position in any given structure may be substituted with more than one substituent selected from a specified group, the substituent may be either the same or different at each position. Combinations of substituents envisioned under this invention are preferably those that result in the formation of stable or chemically feasible compounds. The term “stable”, as used herein, refers to compounds that are not substantially altered when subjected to conditions to allow for their production, detection, and, in certain embodiments, their recovery, purification, and use for one or more of the purposes disclosed herein.

[0589] The term “oxo” as used herein refers to ═O.

[0590] The term “thiocarbonyl” as used herein refers to C═S.

[0591] As used herein, the term “pharmaceutically acceptable salt” refers to those salts which are, within the scope of sound medical judgment, suitable for use in contact with the tissues of humans and lower animals without undue toxicity, irritation, allergic response and the like, and are commensurate with a reasonable benefit/risk ratio. Pharmaceutically acceptable salts are well known in the art. For example, Berge et al., describe pharmaceutically acceptable salts in detail in J. Pharmaceutical Sciences, 1977, 66, 1-19, incorporated herein by reference. Pharmaceutically acceptable salts of the compounds of this invention include those derived from suitable inorganic and organic acids and bases. Examples of pharmaceutically acceptable, nontoxic acid addition salts are salts of an amino group formed with inorganic acids such as hydrochloric acid, hydrobromic acid, phosphoric acid, sulfuric acid, and perchloric acid or with organic acids such as acetic acid, oxalic acid, maleic acid, tartaric acid, citric acid, succinic acid, or malonic acid or by using other methods known in the art such as ion exchange. Other pharmaceutically acceptable salts include adipate, alginate, ascorbate, aspartate, benzenesulfonate, benzoate, bisulfate, borate, butyrate, camphorate, camphorsulfonate, citrate, cyclopentanepropionate, digluconate, dodecylsulfate, ethanesulfonate, formate, fumarate, glucoheptonate, glycerophosphate, gluconate, hemisulfate, heptanoate, hexanoate, hydroiodide, 2-hydroxy-ethanesulfonate, lactobionate, lactate, laurate, lauryl sulfate, malate, maleate, malonate, methanesulfonate, 2-naphthalenesulfonate, nicotinate, nitrate, oleate, oxalate, palmitate, pamoate, pectinate, persulfate, 3-phenylpropionate, phosphate, picrate, pivalate, propionate, stearate, succinate, sulfate, tartrate, thiocyanate, p-toluenesulfonate, undecanoate, valerate salts, and the like. Salts derived from appropriate bases include alkali metal, alkaline earth metal, ammonium and N⁺ (C₁₋₄ alkyl)₄ salts. Representative alkali or alkaline earth metal salts include sodium, lithium, potassium, calcium, magnesium, and the like. Further pharmaceutically acceptable salts include, when appropriate, nontoxic ammonium, quaternary ammonium, and amine cations formed using counterions such as halide, hydroxide, carboxylate, sulfate, phosphate, nitrate, lower alkyl sulfonate, and aryl sulfonate.

[0592] The term “solvate” refers to forms of the compound that are associated with a solvent, usually by a solvolysis reaction. This physical association may include hydrogen bonding. Conventional solvents include water, methanol, ethanol, acetic acid, DMSO, THF, diethyl ether, and the like. The compounds of Formula (I), Formula (I-a), and/or Formula (II) may be prepared, e.g., in crystalline form, and may be solvated. Suitable solvates include pharmaceutically acceptable solvates and further include both stoichiometric solvates and non-stoichiometric solvates. In certain instances, the solvate will be capable of isolation, for example, when one or more solvent molecules are incorporated in the crystal lattice of a crystalline solid. “Solvate” encompasses both solution-phase and isolable solvates. Representative solvates include hydrates, ethanolates, and methanolates.

[0593] The term “hydrate” refers to a compound which is associated with water. Typically, the number of the water molecules contained in a hydrate of a compound is in a definite ratio to the number of the compound molecules in the hydrate. Therefore, a hydrate of a compound may be represented, for example, by the general formula R·x H2O, wherein R is the compound and wherein x is a number greater than 0. A given compound may form more than one type of hydrates, including, e.g., monohydrates (x is 1), lower hydrates (x is a number greater than 0 and smaller than 1, e.g., hemihydrates (R·0.5 H₂O)), and polyhydrates (x is a number greater than 1, e.g., dihydrates (R·2 H₂O) and hexahydrates (R·6 H₂O)).

[0594] It is to be understood that compounds that have the same molecular formula but differ in the nature or sequence of bonding of their atoms or the arrangement of their atoms in space are termed “isomers”. Isomers that differ in the arrangement of their atoms in space are termed “stereoisomers”.

[0595] Stereoisomers that are not mirror images of one another are termed “diastereomers” and those that are non-superimposable mirror images of each other are termed “enantiomers”. When a compound has an asymmetric center, for example, it is bonded to four different groups and a pair of enantiomers is possible. An enantiomer can be characterized by the absolute configuration of its asymmetric center and is described by the R- and S-sequencing rules of Cahn and Prelog, or by the manner in which the molecule rotates the plane of polarized light and designated as dextrorotatory or levorotatory (i.e., as (+) or (−)-isomers respectively). A chiral compound can exist as either individual enantiomer or as a mixture thereof. A mixture containing equal proportions of the enantiomers is called a “racemic mixture”.

[0596] The term “tautomers” refer to compounds that are interchangeable forms of a particular compound structure, and that vary in the displacement of hydrogen atoms and electrons. Thus, two structures may be in equilibrium through the movement of 7t electrons and an atom (usually H). For example, enols and ketones are tautomers because they are rapidly interconverted by treatment with either acid or base. Another example of tautomerism is the aci- and nitro-forms of phenylnitromethane that are likewise formed by treatment with acid or base.

[0597] Tautomeric forms may be relevant to the attainment of the optimal chemical reactivity and biological activity of a compound of interest.

[0598] Unless otherwise stated, structures depicted herein are also meant to include all isomeric (e.g., enantiomeric, diastereomeric, and geometric (or conformational)) forms of the structure; for example, the R and S configurations for each asymmetric center, Z and E double bond isomers, and Z and E conformational isomers. Therefore, single stereochemical isomers as well as enantiomeric, diastereomeric, and geometric (or conformational) mixtures of the present compounds are within the scope of the invention. Unless otherwise stated, all tautomeric forms of the compounds of the invention are within the scope of the invention. Additionally, unless otherwise stated, structures depicted herein are also meant to include compounds that differ only in the presence of one or more isotopically enriched atoms. For example, compounds having the present structures including the replacement of hydrogen by deuterium or tritium, or the replacement of a carbon by a ¹³C- or ¹⁴C-enriched carbon are within the scope of this invention. Such compounds are useful, for example, as analytical tools, as probes in biological assays, or as therapeutic agents in accordance with the present invention.

[0599] Where a particular enantiomer is preferred, it may, in some embodiments be provided substantially free of the corresponding enantiomer, and may also be referred to as “optically enriched.” “Optically-enriched,” as used herein, means that the compound is made up of a significantly greater proportion of one enantiomer. In certain embodiments the compound is made up of at least about 90% by weight of a preferred enantiomer. In other embodiments the compound is made up of at least about 95%, 98%, or 99% by weight of a preferred enantiomer. Preferred enantiomers may be isolated from racemic mixtures by any method known to those skilled in the art, including chiral high pressure liquid chromatography (HPLC) and the formation and crystallization of chiral salts or prepared by asymmetric syntheses. See, for example, Jacques et al., Enantiomers, Racemates and Resolutions (Wiley Interscience, New York, 1981); Wilen, et al., Tetrahedron 33:2725 (1977); Eliel, E. L. Stereochemistry of Carbon Compounds (McGraw-Hill, N Y, 1962); Wilen, S. H. Tables of Resolving Agents and Optical Resolutions p. 268 (E. L. Eliel, Ed., Univ. of Notre Dame Press, Notre Dame, Ind. 1972).

[0600] Various aspects of the compositions and methods herein are described in further detail below. Additional definitions are set out throughout the specification.

### DETAILED DESCRIPTION

[0601] The present invention provides, at least in part, a method of treating a subject having a disease associated with BCMA expression, comprising administering to the subject an effective amount of a cell (e.g., a population of cells) that expresses a CAR molecule that binds BCMA (a “BCMA CAR-expressing cell”). In some embodiments, the disease associated with expression of BCMA is a hematologic cancer, e.g., ALL, CLL, DLBCL, or multiple myeloma. In some embodiments, the BCMA CAR-expressing cell therapy is administered based on the acquisition of a level of a biomarker from a patient sample. In some embodiments, the BCMA CAR-expressing cell therapy is administered to the subject in combination with a second therapy. In some embodiments, the BCMA CAR-expressing cell therapy and the second therapy are administered simultaneously or sequentially.

### Chimeric Antigen Receptor (CAR)

[0602] In one aspect, disclosed herein are methods using a cell (e.g., a population of cells) that expresses a CAR molecule. In one aspect, an exemplary CAR construct comprises an optional leader sequence (e.g., a leader sequence described herein), an antigen binding domain (e.g., an antigen binding domain described herein), a hinge (e.g., a hinge region described herein), a transmembrane domain (e.g., a transmembrane domain described herein), and an intracellular stimulatory domain (e.g., an intracellular stimulatory domain described herein). In one aspect, an exemplary CAR construct comprises an optional leader sequence (e.g., a leader sequence described herein), an extracellular antigen binding domain (e.g., an antigen binding domain described herein), a hinge (e.g., a hinge region described herein), a transmembrane domain (e.g., a transmembrane domain described herein), an intracellular costimulatory signaling domain (e.g., a costimulatory signaling domain described herein) and/or an intracellular primary signaling domain (e.g., a primary signaling domain described herein).

[0603] Sequences of non-limiting examples of various components that can be part of a CAR molecule described herein, are listed in Table 1, where “aa” stands for amino acids, and “na” stands for nucleic acids that encode the corresponding peptide.

TABLE 2
Sequences of various components of CAR (aa-amino acid sequence, na-nucleic acid
sequence).

| SEQ ID | | |
|---|---|---|
| NO: | description | Sequence |
| 1007 | EF-1 | CGTGAGGCTCCGGTGCCCGTCAGTGGGCAGAGCGCACATCGC |
| | promoter | CCACAGTCCCCGAGAAGTTGGGGGGAGGGGTCGGCAATTGAA |
| | | CCGGTGCCTAGAGAAGGTGGCGCGGGGTAAACTGGGAAAGT |
| | | GATGTCGTGTACTGGCTCCGCCTTTTTCCCGAGGGTGGGGGAG |
| | | AACCGTATATAAGTGCAGTAGTCGCCGTGAACGTTCTTTTTCG |
| | | CAACGGGTTTGCCGCCAGAACACAGGTAAGTGCCGTGTGTGG |
| | | TTCCCGCGGGCCTGGCCTCTTTACGGGTTATGGCCCTTGCGTG |
| | | CCTTGAATTACTTCCACCTGGCTGCAGTACGTGATTCTTGATC |
| | | CCGAGCTTCGGGTTGGAAGTGGGTGGGAGAGTTCGAGGCCTT |
| | | GCGCTTAAGGAGCCCCTTCGCCTCGTGCTTGAGTTGAGGCCTG |
| | | GCCTGGGCGCTGGGGCCGCCGCGTGCGAATCTGGTGGCACCT |
| | | TCGCGCCTGTCTCGCTGCTTTCGATAAGTCTCTAGCCATTTAA |
| | | AATTTTTGATGACCTGCTGCGACGCTTTTTTTCTGGCAAGATA |
| | | GTCTTGTAAATGCGGGCCAAGATCTGCACACTGGTATTTCGGT |
| | | TTTTGGGGCCGCGGGCGGCGACGGGGCCCGTGCGTCCCAGCG |
| | | CACATGTTCGGCGAGGCGGGGCCTGCGAGCGCGGCCACCGAG |
| | | AATCGGACGGGGGTAGTCTCAAGCTGGCCGGCCTGCTCTGGT |
| | | GCCTGGCCTCGCGCCGCCGTGTATCGCCCCGCCCTGGGCGGC |
| | | AAGGCTGGCCCGGTCGGCACCAGTTGCGTGAGCGGAAAGATG |
| | | GCCGCTTCCCGGCCCTGCTGCAGGGAGCTCAAAATGGAGGAC |
| | | GCGGCGCTCGGGAGAGCGGGCGGGTGAGTCACCCACACAAA |
| | | GGAAAAGGGCCTTTCCGTCCTCAGCCGTCGCTTCATGTGACTC |
| | | CACGGAGTACCGGGCGCCGTCCAGGCACCTCGATTAGTTCTC |
| | | GAGCTTTTGGAGTACGTCGTCTTTAGGTTGGGGGGAGGGGTTT |
| | | TATGCGATGGAGTTTCCCCACACTGAGTGGGTGGAGACTGAA |
| | | GTTAGGCCAGCTTGGCACTTGATGTAATTCTCCTTGGAATTTG |
| | | CCCTTTTTGAGTTTGGATCTTGGTTCATTCTCAAGCCTCAGAC |
| | | AGTGGTTCAAAGTTTTTTTCTTCCATTTCAGGTGTCGTGA |
| 1008 | Leader (aa) | MALPVTALLLPLALLLHAARP |
| 1009 | Leader (na) | ATGGCCCTGCCTGTGACAGCCCTGCTGCTGCCTCTGGCTCTGC |
| | | TGCTGCATGCCGCTAGACCC |
| 1010 | Leader (na) | ATGGCCCTCCCTGTCACCGCCCTGCTGCTTCCGCTGGCTCTTC |
| | | TGCTCCACGCCGCTCGGCCC |
| 1011 | CD8 hinge | TTTPAPRPPTPAPTIASQPLSLRPEACRPAAGGAVHTRGLDFACD |
| | (aa) | |
| 1012 | CD8 hinge | ACCACGACGCCAGCGCCGCGACCACCAACACCGGCGCCCACC |
| | (na) | ATCGCGTCGCAGCCCCTGTCCCTGCGCCCAGAGGCGTGCCGG |
| | | CCAGCGGCGGGGGGCGCAGTGCACACGAGGGGGCTGGACTT |
| | | CGCCTGTGAT |
| 1013 | Ig4 hinge | ESKYGPPCPPCPAPEFLGGPSVFLFPPKPKDTLMISRTPEVTCVVV |
| | (aa) | DVSQEDPEVQFNWYVDGVEVHNAKTKPREEQFNSTYRVVSVLT |
| | | VLHQDWLNGKEYKCKVSNKGLPSSIEKTISKAKGQPREPQVYTL |
| | | PPSQEEMTKNQVSLTCLVKGFYPSDIAVEWESNGQPENNYKTTP |
| | | PVLDSDGSFFLYSRLTVDKSRWQEGNVFSCSVMHEALHNHYTQ |
| | | KSLSLSLGKM |
| 1014 | Ig4 hinge | GAGAGCAAGTACGGCCCTCCCTGCCCCCCTTGCCCTGCCCCCG |
| | (na) | AGTTCCTGGGCGGACCCAGCGTGTTCCTGTTCCCCCCCAAGCC |
| | | CAAGGACACCCTGATGATCAGCCGGACCCCCGAGGTGACCTG |
| | | TGTGGTGGTGGACGTGTCCCAGGAGGACCCCGAGGTCCAGTT |
| | | CAACTGGTACGTGGACGGCGTGGAGGTGCACAACGCCAAGAC |
| | | CAAGCCCCGGGAGGAGCAGTTCAATAGCACCTACCGGGTGGT |
| | | GTCCGTGCTGACCGTGCTGCACCAGGACTGGCTGAACGGCAA |
| | | GGAATACAAGTGTAAGGTGTCCAACAAGGGCCTGCCCAGCAG |
| | | CATCGAGAAAACCATCAGCAAGGCCAAGGGCCAGCCTCGGG |
| | | AGCCCCAGGTGTACACCCTGCCCCCTAGCCAAGAGGAGATGA |
| | | CCAAGAACCAGGTGTCCCTGACCTGCCTGGTGAAGGGCTTCT |
| | | ACCCCAGCGACATCGCCGTGGAGTGGGAGAGCAACGGCCAG |
| | | CCCGAGAACAACTACAAGACCACCCCCCCTGTGCTGGACAGC |
| | | GACGGCAGCTTCTTCCTGTACAGCCGGCTGACCGTGGACAAG |
| | | AGCCGGTGGCAGGAGGGCAACGTCTTTAGCTGCTCCGTGATG |
| | | CACGAGGCCCTGCACAACCACTACACCCAGAAGAGCCTGAGC |
| | | CTGTCCCTGGGCAAGATG |
| 1015 | IgD hinge | RWPESPKAQASSVPTAQPQAEGSLAKATTAPATTRNTGRGGEEK |
| | (aa) | KKEKEKEEQEERETKTPECPSHTQPLGVYLLTPAVQDLWLRDKA |
| | | TFTCFVVGSDLKDAHLTWEVAGKVPTGGVEEGLLERHSNGSQS |
| | | QHSRLTLPRSLWNAGTSVTCTLNHPSLPPQRLMALREPAAQAPV |
| | | KLSLNLLASSDPPEAASWLLCEVSGFSPPNILLMWLEDQREVNTS |
| | | GFAPARPPPQPGSTTFWAWSVLRVPAPPSPQPATYTCVVSHEDS |
| | | RTLLNASRSLEVSYVTDH |
| 1016 | IgD hinge | AGGTGGCCCGAAAGTCCCAAGGCCCAGGCATCTAGTGTTCCT |
| | (na) | ACTGCACAGCCCCAGGCAGAAGGCAGCCTAGCCAAAGCTACT |
| | | ACTGCACCTGCCACTACGCGCAATACTGGCCGTGGCGGGGAG |
| | | GAGAAGAAAAAGGAGAAAGAGAAAGAAGAACAGGAAGAGA |
| | | GGGAGACCAAGACCCCTGAATGTCCATCCCATACCCAGCCGC |
| | | TGGGCGTCTATCTCTTGACTCCCGCAGTACAGGACTTGTGGCT |
| | | TAGAGATAAGGCCACCTTTACATGTTTCGTCGTGGGCTCTGAC |
| | | CTGAAGGATGCCCATTTGACTTGGGAGGTTGCCGGAAAGGTA |
| | | CCCACAGGGGGGGTTGAGGAAGGGTTGCTGGAGCGCCATTCC |
| | | AATGGCTCTCAGAGCCAGCACTCAAGACTCACCCTTCCGAGA |
| | | TCCCTGTGGAACGCCGGGACCTCTGTCACATGTACTCTAAATC |
| | | ATCCTAGCCTGCCCCCACAGCGTCTGATGGCCCTTAGAGAGC |
| | | CAGCCGCCCAGGCACCAGTTAAGCTTAGCCTGAATCTGCTCG |
| | | CCAGTAGTGATCCCCCAGAGGCCGCCAGCTGGCTCTTATGCG |
| | | AAGTGTCCGGCTTTAGCCCGCCCAACATCTTGCTCATGTGGCT |
| | | GGAGGACCAGCGAGAAGTGAACACCAGCGGCTTCGCTCCAGC |
| | | CCGGCCCCCACCCCAGCCGGGTTCTACCACATTCTGGGCCTGG |
| | | AGTGTCTTAAGGGTCCCAGCACCACCTAGCCCCCAGCCAGCC |
| | | ACATACACCTGTGTTGTGTCCCATGAAGATAGCAGGACCCTG |
| | | CTAAATGCTTCTAGGAGTCTGGAGGTTTCCTACGTGACTGACC |
| | | ATT |
| 1017 | GS | GGGGSGGGGS |
| | hinge/linker | |
| | (aa) | |
| 1018 | GS | GGTGGCGGAGGTTCTGGAGGTGGAGGTTCC |
| | hinge/linker | |
| | (na) | |
| 1019 | CD8 | IYIWAPLAGTCGVLLLSLVITLYC |
| | transmembrane | |
| | (TM) (aa) | |
| 1020 | CD8 | ATCTACATCTGGGCGCCCTTGGCCGGGACTTGTGGGGTCCTTC |
| | transmembrane | TCCTGTCACTGGTTATCACCCTTTACTGC |
| | (TM) (na) | |
| 1021 | CD8 TM (na) | ATCTACATTTGGGCCCCTCTGGCTGGTACTTGCGGGGTCCTGC |
| | | TGCTTTCACTCGTGATCACTCTTTACTGT |
| 1022 | 4-1BB | KRGRKKLLYIFKQPFMRPVQTTQEEDGCSCRFPEEEEGGCEL |
| | intracellular | |
| | domain (aa) | |
| 1023 | 4-1BB | AAACGGGGCAGAAAGAAACTCCTGTATATATTCAAACAACCA |
| | intracellular | TTTATGAGACCAGTACAAACTACTCAAGAGGAAGATGGCTGT |
| | domain (na) | AGCTGCCGATTTCCAGAAGAAGAAGAAGGAGGATGTGAACT |
| | | G |
| 1024 | 4-1BB | AAGCGCGGTCGGAAGAAGCTGCTGTACATCTTTAAGCAACCC |
| | intracellular | TTCATGAGGCCTGTGCAGACTACTCAAGAGGAGGACGGCTGT |
| | domain (na) | TCATGCCGGTTCCCAGAGGAGGAGGAAGGCGGCTGCGAACTG |
| 1025 | CD27 (aa) | QRRKYRSNKGESPVEPAEPCRYSCPREEEGSTIPIQEDYRKPEPAC |
| | | SP |
| 1026 | CD27 (na) | AGGAGTAAGAGGAGCAGGCTCCTGCACAGTGACTACATGAAC |
| | | ATGACTCCCCGCCGCCCCGGGCCCACCCGCAAGCATTACCAG |
| | | CCCTATGCCCCACCACGCGACTTCGCAGCCTATCGCTCC |
| 1027 | CD3-zeta | RVKFSRSADAPAYKQGQNQLYNELNLGRREEYDVLDKRRGRDP |
| | (aa) | EMGGKPRRKNPQEGLYNELQKDKMAEAYSEIGMKGERRRGKG |
| | | HDGLYQGLSTATKDTYDALHMQALPPR |
| 1028 | CD3-zeta | AGAGTGAAGTTCAGCAGGAGCGCAGACGCCCCCGCGTACAA |
| | (na) | GCAGGGCCAGAACCAGCTCTATAACGAGCTCAATCTAGGACG |
| | | AAGAGAGGAGTACGATGTTTTGGACAAGAGACGTGGCCGGG |
| | | ACCCTGAGATGGGGGGAAAGCCGAGAAGGAAGAACCCTCAG |
| | | GAAGGCCTGTACAATGAACTGCAGAAAGATAAGATGGCGGA |
| | | GGCCTACAGTGAGATTGGGATGAAAGGCGAGCGCCGGAGGG |
| | | GCAAGGGGCACGATGGCCTTTACCAGGGTCTCAGTACAGCCA |
| | | CCAAGGACACCTACGACGCCCTTCACATGCAGGCCCTGCCCC |
| | | CTCGC |
| 1029 | CD3-zeta | CGCGTGAAATTCAGCCGCAGCGCAGATGCTCCAGCCTACAAG |
| | (na) | CAGGGGCAGAACCAGCTCTACAACGAACTCAATCTTGGTCGG |
| | | AGAGAGGAGTACGACGTGCTGGACAAGCGGAGAGGACGGGA |
| | | CCCAGAAATGGGCGGGAAGCCGCGCAGAAAGAATCCCCAAG |
| | | AGGGCCTGTACAACGAGCTCCAAAAGGATAAGATGGCAGAA |
| | | GCCTATAGCGAGATTGGTATGAAAGGGGAACGCAGAAGAGG |
| | | CAAAGGCCACGACGGACTGTACCAGGGACTCAGCACCGCCAC |
| | | CAAGGACACCTATGACGCTCTTCACATGCAGGCCCTGCCGCC |
| | | TCGG |
| 1030 | CD3-zeta | RVKFSRSADAPAYQQGQNQLYNELNLGRREEYDVLDKRRGRDP |
| | (aa) | EMGGKPRRKNPQEGLYNELQKDKMAEAYSEIGMKGERRRGKG |
| | | HDGLYQGLSTATKDTYDALHMQALPPR |
| 1031 | CD3-zeta | AGAGTGAAGTTCAGCAGGAGCGCAGACGCCCCCGCGTACCAG |
| | (na) | CAGGGCCAGAACCAGCTCTATAACGAGCTCAATCTAGGACGA |
| | | AGAGAGGAGTACGATGTTTTGGACAAGAGACGTGGCCGGGA |
| | | CCCTGAGATGGGGGGAAAGCCGAGAAGGAAGAACCCTCAGG |
| | | AAGGCCTGTACAATGAACTGCAGAAAGATAAGATGGCGGAG |
| | | GCCTACAGTGAGATTGGGATGAAAGGCGAGCGCCGGAGGGG |
| | | CAAGGGGCACGATGGCCTTTACCAGGGTCTCAGTACAGCCAC |
| | | CAAGGACACCTACGACGCCCTTCACATGCAGGCCCTGCCCCC |
| | | TCGC |
| 1032 | linker | GGGGS |
| 1033 | linker | GGTGGCGGAGGTTCTGGAGGTGGAGGTTCC |
| 1034 | PD-1 | Pgwfldspdrpwnpptfspallvvtegdnatftcsfsntsesfvlnwyrmspsnqtdklaafpedrs |
| | extracellular | qpgqdcrfrvtqlpngrdfhmsvvrarrndsgtylcgaislapkaqikeslraelrvterraevptahp |
| | domain (aa) | spsprpagqfqtlv |
| 1035 | PD-1 | Cccggatggtttctggactctccggatcgcccgtggaatcccccaaccttctcaccggcactcttggtt |
| | extracellular | gtgactgagggcgataatgcgaccttcacgtgctcgttctccaacacctccgaatcattcgtgctgaact |
| | domain (na) | ggtaccgcatgagcccgtcaaaccagaccgacaagctcgccgcgtttccggaagatcggtcgcaac |
| | | cgggacaggattgtcggttccgcgtgactcaactgccgaatggcagagacttccacatgagcgtggtc |
| | | cgcgctaggcgaaacgactccgggacctacctgtgcggagccatctcgctggcgcctaaggcccaa |
| | | atcaaagagagcttgagggccgaactgagagtgaccgagcgcagagctgaggtgccaactgcacat |
| | | ccatccccatcgcctcggcctgcggggcagtttcagaccctggtc |
| 1036 | PD-1 CAR | Malpvtalllplalllhaarppgwfldspdrpwnpptfspallvvtegdnatftcsfsntsesfvlnwy |
| | (aa) with | rmspsnqtdklaafpedrsqpgqdcrfrvtqlpngrdfhmsvvrarrndsgtylcgaislapkaqik |
| | signal | eslraelrvterraevptahpspsprpagqfqtlvtapaprpptpaptiasqplslrpeacrpaaggav |
| | | htrgldfacdiyiwaplagtcgvlllslvitlyckrgrkkllyifkqpfmrpvqttqeedgcscrfpeee |
| | | eggcelrvkfsrsadapaykqgqnqlynelnlgrreeydvldkrrgrdpemggkprrknpqegly |
| | | nelqkdkmaeayseigmkgerrrgkghdglyqglstatkdtydalhmqalppr |
| 1037 | PD-1 CAR | Atggccctccctgtcactgccctgcttctccccctcgcactcctgctccacgccgctagaccacccgg |
| | (na) | atggtttctggactctccggatcgcccgtggaatcccccaaccttctcaccggcactcttggttgtgactg |
| | | agggcgataatgcgaccttcacgtgctcgttctccaacacctccgaatcattcgtgctgaactggtaccg |
| | | catgagcccgtcaaaccagaccgacaagctcgccgcgtttccggaagatcggtcgcaaccgggaca |
| | | ggattgtcggttccgcgtgactcaactgccgaatggcagagacttccacatgagcgtggtccgcgcta |
| | | ggcgaaacgactccgggacctacctgtgcggagccatctcgctggcgcctaaggcccaaatcaaag |
| | | agagcttgagggccgaactgagagtgaccgagcgcagagctgaggtgccaactgcacatccatccc |
| | | catcgcctcggcctgcggggcagtttcagaccctggtcacgaccactccggcgccgcgcccaccga |
| | | ctccggccccaactatcgcgagccagcccctgtcgctgaggccggaagcatgccgccctgccgccg |
| | | gaggtgctgtgcatacccggggattggacttcgcatgcgacatctacatttgggctcctctcgccggaa |
| | | cttgtggcgtgctccttctgtccctggtcatcaccctgtactgcaagcggggtcggaaaaagcttctgta |
| | | cattttcaagcagcccttcatgaggcccgtgcaaaccacccaggaggaggacggttgctcctgccggt |
| | | tccccgaagaggaagaaggaggttgcgagctgcgcgtgaagttctcccggagcgccgacgccccc |
| | | gcctataagcagggccagaaccagctgtacaacgaactgaacctgggacggcgggaagagtacgat |
| | | gtgctggacaagcggcgcggccgggaccccgaaatgggcgggaagcctagaagaaagaaccctc |
| | | aggaaggcctgtataacgagctgcagaaggacaagatggccgaggcctactccgaaattgggatga |
| | | agggagagcggcggaggggaaaggggcacgacggcctgtaccaaggactgtccaccgccaccaa |
| | | ggacacatacgatgccctgcacatgcaggcccttccccctcgc |
| 1038 | linker | (Gly-Gly-Gly-Ser)n, where n = 1-10 |
| 1039 | linker | (Gly4 Ser)4 |
| 1040 | linker | (Gly4 Ser)3 |
| 1041 | linker | (Gly3Ser) |
| 1042 | linker | ASGGGGSGGRASGGGGS |
| 1043 | polyA | [a]₅₀₋₅₀₀₀ |
| 1044 | PD1 CAR | Pgwfldspdrpwnpptfspallvvtegdnatftcsfsntsesfvlnwyrmspsnqtdklaafpedrs |
| | (aa) | gpgqdcrfrvtqlpngrdfhmsvvrarrndsgtylcgaislapkaqikeslraelrvterraevptahp |
| | | spsprpagqfqtlvtttpaprpptpaptiasqplslrpeacrpaaggavhtrgldfacdiyiwaplagt |
| | | cgvlllslvitlyckrgrkkllyifkqpfmrpvqttqeedgcscrfpeeeeggcelrvkfsrsadapay |
| | | kqgqnqlynelnlgrreeydvldlargrdpemggkprrknpqeglynelqkdkmaeayseigm |
| | | kgerrrgkghdglyqglstatkdtydalhmqalppr |
| 1045 | ICOS | TKKKYSSSVHDPNGEYMFMRAVNTAKKSRLTDVTL |
| | intracellular | |
| | domain (aa) | |
| 1046 | ICOS | ACAAAAAAGAAGTATTCATCCAGTGTGCACGACCCTAACGGT |
| | intracellular | GAATACATGTTCATGAGAGCAGTGAACACAGCCAAAAAATCC |
| | domain (na) | AGACTCACAGATGTGACCCTA |
| 1047 | ICOS TM | TTTPAPRPPTPAPTIASQPLSLRPEACRPAAGGAVHTRGLDFACD |
| | domain (aa) | FWLPIGCAAFVVVCILGCILICWL |
| 1048 | ICOS TM | ACCACGACGCCAGCGCCGCGACCACCAACACCGGCGCCCACC |
| | domain (na) | ATCGCGTCGCAGCCCCTGTCCCTGCGCCCAGAGGCGTGCCGG |
| | | CCAGCGGCGGGGGGCGCAGTGCACACGAGGGGGCTGGACTT |
| | | CGCCTGTGATTTCTGGTTACCCATAGGATGTGCAGCCTTTGTT |
| | | GTAGTCTGCATTTTGGGATGCATACTTATTTGTTGGCTT |
| 1049 | CD28 | RSKRSRLLHSDYMNMTPRRPGPTRKHYQPYAPPRDFAAYRS |
| | intracellular | |
| | domain (aa) | |
| 1050 | CD28 | AGGAGTAAGAGGAGCAGGCTCCTGCACAGTGACTACATGAAC |
| | intracellular | ATGACTCCCCGCCGCCCCGGGCCCACCCGCAAGCATTACCAG |
| | domain (na) | CCCTATGCCCCACCACGCGACTTCGCAGCCTATCGCTCC |

### CAR Antigen Binding Domain

[0604] In one aspect, the portion of the CAR comprising the antigen binding domain comprises an antigen binding domain that targets a tumor antigen, e.g., a tumor antigen described herein. In some embodiments, the antigen binding domain binds to: CD19; CD123; CD22; CD30; CD171; CS-1; C-type lectin-like molecule-1, CD33; epidermal growth factor receptor variant III (EGFRvIII); ganglioside G2 (GD2); ganglioside GD3; TNF receptor family member; B-cell maturation antigen (BCMA); Tn antigen ((Tn Ag) or (GalNAca-Ser/Thr)); prostate-specific membrane antigen (PSMA); Receptor tyrosine kinase-like orphan receptor 1 (ROR1); Fms-Like Tyrosine Kinase 3 (FLT3); Tumor-associated glycoprotein 72 (TAG72); CD38; CD44v6; Carcinoembryonic antigen (CEA); Epithelial cell adhesion molecule (EPCAM); B7H3 (CD276); KIT (CD117); Interleukin-13 receptor subunit alpha-2; Mesothelin; Interleukin 11 receptor alpha (IL-11Ra); prostate stem cell antigen (PSCA); Protease Serine 21; vascular endothelial growth factor receptor 2 (VEGFR2); Lewis(Y) antigen; CD24; Platelet-derived growth factor receptor beta (PDGFR-beta); Stage-specific embryonic antigen-4 (SSEA-4); CD20; Folate receptor alpha; Receptor tyrosine-protein kinase ERBB2 (Her2/neu); Mucin 1, cell surface associated (MUC1); epidermal growth factor receptor (EGFR); neural cell adhesion molecule (NCAM); Prostase; prostatic acid phosphatase (PAP); elongation factor 2 mutated (ELF2M); Ephrin B2; fibroblast activation protein alpha (FAP); insulin-like growth factor 1 receptor (IGF-I receptor), carbonic anhydrase IX (CAIX); Proteasome (Prosome, Macropain) Subunit, Beta Type, 9 (LMP2); glycoprotein 100 (gp100); oncogene fusion protein consisting of breakpoint cluster region (BCR) and Abelson murine leukemia viral oncogene homolog 1 (Abl) (bcr-abl); tyrosinase; ephrin type-A receptor 2 (EphA2); Fucosyl GM1; sialyl Lewis adhesion molecule (sLe); ganglioside GM3; transglutaminase 5 (TGSS); high molecular weight-melanoma-associated antigen (HMWMAA); o-acetyl-GD2 ganglioside (OAcGD2); Folate receptor beta; tumor endothelial marker 1 (TEM1/CD248); tumor endothelial marker 7-related (TEM7R); claudin 6 (CLDN6); thyroid stimulating hormone receptor (TSHR); G protein-coupled receptor class C group 5, member D (GPRCSD); chromosome X open reading frame 61 (CXORF61); CD97; CD179a; anaplastic lymphoma kinase (ALK); Polysialic acid; placenta-specific 1 (PLAC1); hexasaccharide portion of globoH glycoceramide (GloboH); mammary gland differentiation antigen (NY-BR-1); uroplakin 2 (UPK2); Hepatitis A virus cellular receptor 1 (HAVCR1); adrenoceptor beta 3 (ADRB3); pannexin 3 (PANX3); G protein-coupled receptor 20 (GPR20); lymphocyte antigen 6 complex, locus K 9 (LY6K); Olfactory receptor 51E2 (OR51E2); TCR Gamma Alternate Reading Frame Protein (TARP); Wilms tumor protein (WT1); Cancer/testis antigen 1 (NY-ESO-1); Cancer/testis antigen 2 (LAGE-1a); Melanoma-associated antigen 1 (MAGE-A1); ETS translocation-variant gene 6, located on chromosome 12p (ETV6-AML); sperm protein 17 (SPA17); X Antigen Family, Member 1A (XAGE1); angiopoietin-binding cell surface receptor 2 (Tie 2); melanoma cancer testis antigen-1 (MAD-CT-1); melanoma cancer testis antigen-2 (MAD-CT-2); Fos-related antigen 1; tumor protein p53 (p53); p53 mutant; prostein; surviving; telomerase; prostate carcinoma tumor antigen-1, melanoma antigen recognized by T cells 1; Rat sarcoma (Ras) mutant; human Telomerase reverse transcriptase (hTERT); sarcoma translocation breakpoints; melanoma inhibitor of apoptosis (ML-IAP); ERG (transmembrane protease, serine 2 (TMPRSS2) ETS fusion gene); N-Acetyl glucosaminyl-transferase V (NA17); paired box protein Pax-3 (PAX3); Androgen receptor; Cyclin B1; v-myc avian myelocytomatosis viral oncogene neuroblastoma derived homolog (MYCN); Ras Homolog Family Member C (RhoC); Tyrosinase-related protein 2 (TRP-2); Cytochrome P450 1B1 (CYP1B1); CCCTC-Binding Factor (Zinc Finger Protein)-Like, Squamous Cell Carcinoma Antigen Recognized By T Cells 3 (SART3); Paired box protein Pax-5 (PAXS); proacrosin binding protein sp32 (OY-TES1); lymphocyte-specific protein tyrosine kinase (LCK); A kinase anchor protein 4 (AKAP-4); synovial sarcoma, X breakpoint 2 (SSX2); Receptor for Advanced Glycation Endproducts (RAGE-1); renal ubiquitous 1 (RU1); renal ubiquitous 2 (RU2); legumain; human papilloma virus E6 (HPV E6); human papilloma virus E7 (HPV E7); intestinal carboxyl esterase; heat shock protein 70-2 mutated (mut hsp70-2); CD79a; CD79b; CD72; Leukocyte-associated immunoglobulin-like receptor 1 (LAIR1); Fc fragment of IgA receptor (FCAR or CD89); Leukocyte immunoglobulin-like receptor subfamily A member 2 (LILRA2); CD300 molecule-like family member f (CD300LF); C-type lectin domain family 12 member A (CLEC12A); bone marrow stromal cell antigen 2 (BST2); EGF-like module-containing mucin-like hormone receptor-like 2 (EMR2); lymphocyte antigen 75 (LY75); Glypican-3 (GPC3); Fc receptor-like 5 (FCRL5); or immunoglobulin lambda-like polypeptide 1 (IGLL1).

[0605] The antigen binding domain can be any domain that binds to an antigen, including but not limited to a monoclonal antibody, a polyclonal antibody, a recombinant antibody, a human antibody, a humanized antibody, and a functional fragment thereof, including but not limited to a single-domain antibody such as a heavy chain variable domain (VH), a light chain variable domain (VL) and a variable domain (VHH) of camelid derived nanobody, and to an alternative scaffold known in the art to function as antigen binding domain, such as a recombinant fibronectin domain, a T cell receptor (TCR), or a fragment there of, e.g., single chain TCR, and the like. In some instances, it is beneficial for the antigen binding domain to be derived from the same species in which the CAR will ultimately be used in. For example, for use in humans, it may be beneficial for the antigen binding domain of the CAR to comprise human or humanized residues for the antigen binding domain of an antibody or antibody fragment.

### CAR Transmembrane Domain

[0606] With respect to the transmembrane domain, in various embodiments, a CAR can be designed to comprise a transmembrane domain that is attached to the extracellular domain of the CAR. A transmembrane domain can include one or more additional amino acids adjacent to the transmembrane region, e.g., one or more amino acid associated with the extracellular region of the protein from which the transmembrane was derived (e.g., 1, 2, 3, 4, 5, 6, 7, 8, 9, 10 up to 15 amino acids of the extracellular region) and/or one or more additional amino acids associated with the intracellular region of the protein from which the transmembrane protein is derived (e.g., 1, 2, 3, 4, 5, 6, 7, 8, 9, 10 up to 15 amino acids of the intracellular region). In one aspect, the transmembrane domain is one that is associated with one of the other domains of the CAR. In some instances, the transmembrane domain can be selected or modified by amino acid substitution to avoid binding of such domains to the transmembrane domains of the same or different surface membrane proteins, e.g., to minimize interactions with other members of the receptor complex. In one aspect, the transmembrane domain is capable of homodimerization with another CAR on the cell surface of a CAR-expressing cell. In a different aspect, the amino acid sequence of the transmembrane domain may be modified or substituted so as to minimize interactions with the binding domains of the native binding partner present in the same CART.

[0607] The transmembrane domain may be derived either from a natural or from a recombinant source. Where the source is natural, the domain may be derived from any membrane-bound or transmembrane protein. In one aspect the transmembrane domain is capable of signaling to the intracellular domain(s) whenever the CAR has bound to a target. A transmembrane domain of particular use in this invention may include at least the transmembrane region(s) of e.g., the alpha, beta or zeta chain of the T-cell receptor, CD28, CD27, CD3 epsilon, CD45, CD4, CDS, CD8, CD9, CD16, CD22, CD33, CD37, CD64, CD80, CD86, CD134, CD137, CD154. In some embodiments, a transmembrane domain may include at least the transmembrane region(s) of, e.g., KIR2DS2, OX40, CD2, CD27, LFA-1 (CD11a, CD18), ICOS (CD278), 4-1BB (CD137), GITR, CD40, BAFFR, HVEM (LIGHTR), SLAMF7, NKp80 (KLRF1), NKp44, NKp30, NKp46, CD160, CD19, IL2R beta, IL2R gamma, IL7R a, ITGA1, VLA1, CD49a, ITGA4, IA4, CD49D, ITGA6, VLA-6, CD49f, ITGAD, CD11d, ITGAE, CD103, ITGAL, CD11a, LFA-1, ITGAM, CD11b, ITGAX, CD11c, ITGB1, CD29, ITGB2, CD18, LFA-1, ITGB7, TNFR2, DNAM1 (CD226), SLAMF4 (CD244, 2B4), CD84, CD96 (Tactile), CEACAM1, CRTAM, Ly9 (CD229), CD160 (BY55), PSGL1, CD100 (SEMA4D), SLAMF6 (NTB-A, Ly108), SLAM (SLAMF1, CD150, IPO-3), BLAME (SLAMF8), SELPLG (CD162), LTBR, PAG/Cbp, NKG2D, NKG2C.

[0608] In some instances, the transmembrane domain can be attached to the extracellular region of the CAR, e.g., the antigen binding domain of the CAR, via a hinge, e.g., a hinge from a human protein. For example, in one embodiment, the hinge can be a human Ig (immunoglobulin) hinge, e.g., an IgG4 hinge, or a CD8a hinge. In one embodiment, the hinge or spacer comprises (e.g., consists of) the amino acid sequence of SEQ ID NO: 1011. In one aspect, the transmembrane domain comprises (e.g., consists of) a transmembrane domain of SEQ ID NO: 1019.

[0609] In one aspect, the hinge or spacer comprises an IgG4 hinge. For example, in one embodiment, the hinge or spacer comprises a hinge of the amino acid sequence of SEQ ID NO: 1013. In some embodiments, the hinge or spacer comprises a hinge encoded by a nucleotide sequence of SEQ ID NO: 1014.

[0610] In one aspect, the hinge or spacer comprises an IgD hinge. For example, in one embodiment, the hinge or spacer comprises a hinge of the amino acid sequence of SEQ ID NO: 1015. In some embodiments, the hinge or spacer comprises a hinge encoded by a nucleotide sequence of SEQ ID NO: 1016.

[0611] In one aspect, the transmembrane domain may be recombinant, in which case it will comprise predominantly hydrophobic residues such as leucine and valine. In one aspect a triplet of phenylalanine, tryptophan and valine can be found at each end of a recombinant transmembrane domain.

[0612] Optionally, a short oligo- or polypeptide linker, between 2 and 10 amino acids in length may form the linkage between the transmembrane domain and the cytoplasmic region of the CAR. A glycine-serine doublet provides a particularly suitable linker. For example, in one aspect, the linker comprises the amino acid sequence of SEQ ID NO: 1017. In some embodiments, the linker is encoded by a nucleotide sequence of SEQ ID NO: 1018.

[0613] In one aspect, the hinge or spacer comprises a KIR2DS2 hinge.

### Cytoplasmic Domain

[0614] The cytoplasmic domain or region of the CAR includes an intracellular signaling domain. An intracellular signaling domain is generally responsible for activation of at least one of the normal effector functions of the immune cell in which the CAR has been introduced.

[0615] Examples of intracellular signaling domains for use in a CAR described herein include the cytoplasmic sequences of the T cell receptor (TCR) and co-receptors that act in concert to initiate signal transduction following antigen receptor engagement, as well as any derivative or variant of these sequences and any recombinant sequence that has the same functional capability.

[0616] It is known that signals generated through the TCR alone are insufficient for full activation of the T cell and that a secondary and/or costimulatory signal is also required. Thus, T cell activation can be said to be mediated by two distinct classes of cytoplasmic signaling sequences: those that initiate antigen-dependent primary activation through the TCR (primary intracellular signaling domains) and those that act in an antigen-independent manner to provide a secondary or costimulatory signal (secondary cytoplasmic domain, e.g., a costimulatory domain).

[0617] A primary signaling domain regulates primary activation of the TCR complex either in a stimulatory way, or in an inhibitory way. Primary intracellular signaling domains that act in a stimulatory manner may contain signaling motifs which are known as immunoreceptor tyrosine-based activation motifs or ITAMs.

[0618] Examples of ITAM containing primary intracellular signaling domains that are of particular use in the invention include those of TCR zeta, FcR gamma, FcR beta, CD3 gamma, CD3 delta, CD3 epsilon, CD5, CD22, CD79a, CD79b, CD278 (also known as “ICOS”), FccRI, DAP10, DAP12, and CD66d. In one embodiment, a CAR of the invention comprises an intracellular signaling domain, e.g., a primary signaling domain of CD3-zeta, e.g., a CD3-zeta sequence described herein.

[0619] In one embodiment, a primary signaling domain comprises a modified ITAM domain, e.g., a mutated ITAM domain which has altered (e.g., increased or decreased) activity as compared to the native ITAM domain. In one embodiment, a primary signaling domain comprises a modified ITAM-containing primary intracellular signaling domain, e.g., an optimized and/or truncated ITAM-containing primary intracellular signaling domain. In an embodiment, a primary signaling domain comprises one, two, three, four or more ITAM motifs.

### Costimulatory Signaling Domain

[0620] The intracellular signalling domain of the CAR can comprise the CD3-zeta signaling domain by itself or it can be combined with any other desired intracellular signaling domain(s) useful in the context of a CAR of the invention. For example, the intracellular signaling domain of the CAR can comprise a CD3 zeta chain portion and a costimulatory signaling domain. The costimulatory signaling domain refers to a portion of the CAR comprising the intracellular domain of a costimulatory molecule. In one embodiment, the intracellular domain is designed to comprise the signaling domain of CD3-zeta and the signaling domain of CD28. In one aspect, the intracellular domain is designed to comprise the signaling domain of CD3-zeta and the signaling domain of ICOS.

[0621] A costimulatory molecule can be a cell surface molecule other than an antigen receptor or its ligands that is required for an efficient response of lymphocytes to an antigen. Examples of such molecules include CD27, CD28, 4-1BB (CD137), OX40, CD30, CD40, PD-1, ICOS, lymphocyte function-associated antigen-1 (LFA-1), CD2, CD7, LIGHT, NKG2C, B7-H3, and a ligand that specifically binds with CD83, and the like. For example, CD27 costimulation has been demonstrated to enhance expansion, effector function, and survival of human CART cells in vitro and augments human T cell persistence and antitumor activity in vivo (Song et al. Blood. 2012; 119(3):696-706). Further examples of such costimulatory molecules include CDS, ICAM-1, GITR, BAFFR, HVEM (LIGHTR), SLAMF7, NKp80 (KLRF1), NKp30, NKp44, NKp46, CD160, CD19, CD4, CD8alpha, CD8beta, IL2R beta, IL2R gamma, IL7R alpha, ITGA4, VLA1, CD49a, ITGA4, IA4, CD49D, ITGA6, VLA-6, CD49f, ITGAD, CD11d, ITGAE, CD103, ITGAL, CD11a, LFA-1, ITGAM, CD11 b, ITGAX, CD11c, ITGB1, CD29, ITGB2, CD18, LFA-1, ITGB7, TNFR2, TRANCE/RANKL, DNAM1 (CD226), SLAMF4 (CD244, 2B4), CD84, CD96 (Tactile), CEACAM1, CRTAM, Ly9 (CD229), CD160 (BY55), PSGL1, CD100 (SEMA4D), CD69, SLAMF6 (NTB-A, Ly108), SLAM (SLAMF1, CD150, IPO-3), BLAME (SLAMF8), SELPLG (CD162), LTBR, LAT, GADS, SLP-76, NKG2D, NKG2C and PAG/Cbp.

[0622] The intracellular signaling sequences within the cytoplasmic portion of the CAR may be linked to each other in a random or specified order. Optionally, a short oligo- or polypeptide linker, for example, between 2 and 10 amino acids (e.g., 2, 3, 4, 5, 6, 7, 8, 9, or 10 amino acids) in length may form the linkage between intracellular signaling sequence. In one embodiment, a glycine-serine doublet can be used as a suitable linker. In one embodiment, a single amino acid, e.g., an alanine, a glycine, can be used as a suitable linker.

[0623] In one aspect, the intracellular signaling domain is designed to comprise two or more, e.g., 2, 3, 4, 5, or more, costimulatory signaling domains. In an embodiment, the two or more, e.g., 2, 3, 4, 5, or more, costimulatory signaling domains, are separated by a linker molecule, e.g., a linker molecule described herein. In one embodiment, the intracellular signaling domain comprises two costimulatory signaling domains. In some embodiments, the linker molecule is a glycine residue. In some embodiments, the linker is an alanine residue.

[0624] In one aspect, the intracellular signaling domain is designed to comprise the signaling domain of CD3-zeta and the signaling domain of CD28. In one aspect, the intracellular signaling domain is designed to comprise the signaling domain of CD3-zeta and the signaling domain of 4-1BB. In one aspect, the signaling domain of 4-1BB is a signaling domain of SEQ ID NO: 1022. In one aspect, the signaling domain of CD3-zeta is a signaling domain of SEQ ID NO: 1027.

[0625] In one aspect, the intracellular signaling domain is designed to comprise the signaling domain of CD3-zeta and the signaling domain of CD27. In one aspect, the signaling domain of CD27 comprises an amino acid sequence of SEQ ID NO: 1025. In one aspect, the signalling domain of CD27 is encoded by a nucleic acid sequence of SEQ ID NO: 1026.

[0626] In one aspect, the CAR-expressing cell described herein can further comprise a second CAR, e.g., a second CAR that includes a different antigen binding domain, e.g., to the same target or a different target (e.g., a target other than a cancer associated antigen described herein or a different cancer associated antigen described herein, e.g., CD19, CD33, CLL-1, CD34, FLT3, or folate receptor beta). In one embodiment, the second CAR includes an antigen binding domain to a target expressed the same cancer cell type as the cancer associated antigen. In one embodiment, the CAR-expressing cell comprises a first CAR that targets a first antigen and includes an intracellular signaling domain having a costimulatory signaling domain but not a primary signaling domain, and a second CAR that targets a second, different, antigen and includes an intracellular signaling domain having a primary signaling domain but not a costimulatory signaling domain. While not wishing to be bound by theory, placement of a costimulatory signaling domain, e.g., 4-1BB, CD28, ICOS, CD27 or OX-40, onto the first CAR, and the primary signaling domain, e.g., CD3 zeta, on the second CAR can limit the CAR activity to cells where both targets are expressed. In one embodiment, the CAR expressing cell comprises a first cancer associated antigen CAR that includes an antigen binding domain that binds a target antigen described herein, a transmembrane domain and a costimulatory domain and a second CAR that targets a different target antigen (e.g., an antigen expressed on that same cancer cell type as the first target antigen) and includes an antigen binding domain, a transmembrane domain and a primary signaling domain. In another embodiment, the CAR expressing cell comprises a first CAR that includes an antigen binding domain that binds a target antigen described herein, a transmembrane domain and a primary signaling domain and a second CAR that targets an antigen other than the first target antigen (e.g., an antigen expressed on the same cancer cell type as the first target antigen) and includes an antigen binding domain to the antigen, a transmembrane domain and a costimulatory signaling domain.

[0627] In another aspect, the disclosure features a population of CAR-expressing cells, e.g., CART cells. In some embodiments, the population of CAR-expressing cells comprises a mixture of cells expressing different CARs. For example, in one embodiment, the population of CART cells can include a first cell expressing a CAR having an antigen binding domain to a cancer associated antigen described herein, and a second cell expressing a CAR having a different antigen binding domain, e.g., an antigen binding domain to a different a cancer associated antigen described herein, e.g., an antigen binding domain to a cancer associated antigen described herein that differs from the cancer associate antigen bound by the antigen binding domain of the CAR expressed by the first cell. As another example, the population of CAR-expressing cells can include a first cell expressing a CAR that includes an antigen binding domain to a cancer associated antigen described herein, and a second cell expressing a CAR that includes an antigen binding domain to a target other than a cancer associate antigen as described herein. In one embodiment, the population of CAR-expressing cells includes, e.g., a first cell expressing a CAR that includes a primary intracellular signaling domain, and a second cell expressing a CAR that includes a secondary signaling domain.

[0628] In another aspect, the disclosure features a population of cells wherein at least one cell in the population expresses a CAR having an antigen binding domain to a cancer associated antigen described herein, and a second cell expressing another agent, e.g., an agent which enhances the activity of a CAR-expressing cell. For example, in one embodiment, the agent can be an agent which inhibits an inhibitory molecule. Inhibitory molecules, e.g., PD-1, can, in some embodiments, decrease the ability of a CAR-expressing cell to mount an immune effector response. Examples of inhibitory molecules include PD-1, PD-L1, CTLA4, TIM3, CEACAM (CEACAM-1, CEACAM-3, and/or CEACAM-5), LAG3, VISTA, BTLA, TIGIT, LAIR1, CD160, 2B4, CD80, CD86, B7-H3 (CD276), B7-H4 (VTCN1), HVEM (TNFRSF14 or CD270), KIR, A2aR, MHC class I, MHC class II, GALS, adenosine, and TGF (e.g., TGFbeta). In one embodiment, the agent which inhibits an inhibitory molecule comprises a first polypeptide, e.g., an inhibitory molecule, associated with a second polypeptide that provides a positive signal to the cell, e.g., an intracellular signaling domain described herein. In one embodiment, the agent comprises a first polypeptide, e.g., of an inhibitory molecule such as PD-1, PD-L1, CTLA4, TIM3, CEACAM (CEACAM-1, CEACAM-3, and/or CEACAM-5), LAG3, VISTA, BTLA, TIGIT, LAIR1, CD160, 2B4 and TGF beta, or a fragment of any of these, and a second polypeptide which is an intracellular signaling domain described herein (e.g., comprising a costimulatory domain (e.g., 41BB, CD27, OX40 or CD28, e.g., as described herein) and/or a primary signaling domain (e.g., a CD3 zeta signaling domain described herein). In one embodiment, the agent comprises a first polypeptide of PD-1 or a fragment thereof, and a second polypeptide of an intracellular signaling domain described herein (e.g., a CD28 signaling domain described herein and/or a CD3 zeta signaling domain described herein).

### BCMA CAR

[0629] In one aspect, the CAR disclosed herein binds to BCMA. Exemplary BCMA CARs can include sequences disclosed in Table 1 or 16 of WO2016/014565, incorporated herein by reference. The BCMA CAR construct can include an optional leader sequence; an optional hinge domain, e.g., a CD8 hinge domain; a transmembrane domain, e.g., a CD8 transmembrane domain; an intracellular domain, e.g., a 4-1BB intracellular domain; and a functional signaling domain, e.g., a CD3 zeta domain. In certain embodiments, the domains are contiguous and in the same reading frame to form a single fusion protein. In other embodiments, the domain are in separate polypeptides, e.g., as in an RCAR molecule as described herein.

[0630] The sequences of exemplary BCMA CAR molecules or fragments thereof are disclosed in Tables 2-5. In certain embodiments, the full length BCMA CAR molecule includes one or more CDRs, VH, VL, scFv, or full-length sequences of, BCMA-1, BCMA-2, BCMA-3, BCMA-4, BCMA-5, BCMA-6, BCMA-7, BCMA-8, BCMA-9, BCMA-10, BCMA-11, BCMA-12, BCMA-13, BCMA-14, BCMA-15, 149362, 149363, 149364, 149365, 149366, 149367, 149368, 149369, BCMA_EBB-C1978-A4, BCMA_EBB-C1978-G1, BCMA_EBB-C1979-C1, BCMA_EBB-C1978-C7, BCMA_EBB-C1978-D10, BCMA_EBB-C1979-C12, BCMA_EBB-C1980-G4, BCMA_EBB-C1980-D2, BCMA_EBB-C1978-A10, BCMA_EBB-C1978-D4, BCMA_EBB-C1980-A2, BCMA_EBB-C1981-C3, BCMA_EBB-C1978-G4, A7D12.2, C11D5.3, C12A3.2, or C13F12.1, as disclosed in Tables 2-5, or a sequence substantially (e.g., 95-99%) identical thereto.

[0631] Additional exemplary BCMA-targeting sequences that can be used in the anti-BCMA CAR constructs are disclosed in WO 2017/021450, WO 2017/011804, WO 2017/025038, WO 2016/090327, WO 2016/130598, WO 2016/210293, WO 2016/090320, WO 2016/014789, WO 2016/094304, WO 2016/154055, WO 2015/166073, WO 2015/188119, WO 2015/158671, U.S. Pat. Nos. 9,243,058, 8,920,776, U.S. Pat. Nos. 9,273,141, 7,083,785, 9,034,324, US 2007/0049735, US 2015/0284467, US 2015/0051266, US 2015/0344844, US 2016/0131655, US 2016/0297884, US 2016/0297885, US 2017/0051308, US 2017/0051252, US 2017/0051252, WO 2016/020332, WO 2016/087531, WO 2016/079177, WO 2015/172800, WO 2017/008169, U.S. Pat. No. 9,340,621, US 2013/0273055, US 2016/0176973, US 2015/0368351, US 2017/0051068, US 2016/0368988, and US 2015/0232557, herein incorporated by reference in their entirety. In some embodiments, additional exemplary BCMA CAR constructs are generated using the VH and VL sequences from PCT Publication WO2012/0163805 (the contents of which are hereby incorporated by reference in its entirety).

TABLE 2
Amino Acid and Nucleic Acid Sequences of exemplary anti-BCMA scFv domains and
BCMA CAR molecules. The amino acid sequences variable heavy chain and
variable light chain sequences for each scFv is also provided.

| | | |
|---|---|---|
| | SEQ | |
| Name/ | ID | |
| Description | NO: | Sequence |

139109

| | | |
|---|---|---|
| 139109-aa | 49 | EVQLVESGGGLVQPGGSLRLSCAVSGFALSNHGMSWVRRAPGKGLEWVS |
| ScFv domain | | GIVYSGSTYYAASVKGRFTISRDNSRNTLYLQMNSLRPEDTAIYYCSAH |
| | | GGESDVWGQGTTVTVSSASGGGGSGGRASGGGGSDIQLTQSPSSLSASV |
| | | GDRVTITCRASQSISSYLNWYQQKPGKAPKLLIYAASSLQSGVPSRFSG |
| | | SGSGTDFTLTISSLQPEDFATYYCQQSYSTPYTFGQGTKVEIK |
| 139109-nt | 64 | GAAGTGCAATTGGTGGAATCAGGGGGAGGACTTGTGCAGCCTGGAGGAT |
| ScFv domain | | CGCTGAGACTGTCATGTGCCGTGTCCGGCTTTGCCCTGTCCAACCACGG |
| | | GATGTCCTGGGTCCGCCGCGCGCCTGGAAAGGGCCTCGAATGGGTGTCG |
| | | GGTATTGTGTACAGCGGTAGCACCTACTATGCCGCATCCGTGAAGGGGA |
| | | GATTCACCATCAGCCGGGACAACTCCAGGAACACTCTGTACCTCCAAAT |
| | | GAATTCGCTGAGGCCAGAGGACACTGCCATCTACTACTGCTCCGCGCAT |
| | | GGCGGAGAGTCCGACGTCTGGGGACAGGGGACCACCGTGACCGTGTCTA |
| | | GCGCGTCCGGCGGAGGCGGCAGCGGGGGTCGGGCATCAGGGGGCGGCGG |
| | | ATCGGACATCCAGCTCACCCAGTCCCCGAGCTCGCTGTCCGCCTCCGTG |
| | | GGAGATCGGGTCACCATCACGTGCCGCGCCAGCCAGTCGATTTCCTCCT |
| | | ACCTGAACTGGTACCAACAGAAGCCCGGAAAAGCCCCGAAGCTTCTCAT |
| | | CTACGCCGCCTCGAGCCTGCAGTCAGGAGTGCCCTCACGGTTCTCCGGC |
| | | TCCGGTTCCGGTACTGATTTCACCCTGACCATTTCCTCCCTGCAACCGG |
| | | AGGACTTCGCTACTTACTACTGCCAGCAGTCGTACTCCACCCCCTACAC |
| | | TTTCGGACAAGGCACCAAGGTCGAAATCAAG |
| 139109-aa | 79 | EVQLVESGGGLVQPGGSLRLSCAVSGFALSNHGMSWVRRAPGKGLEWVS |
| VH | | GIVYSGSTYYAASVKGRFTISRDNSRNTLYLQMNSLRPEDTAIYYCSAH |
| | | GGESDVWGQGTTVTVSS |
| 139109-aa | 94 | DIQLTQSPSSLSASVGDRVTITCRASQSISSYLNWYQQKPGKAPKLLIY |
| VL | | AASSLQSGVPSRFSGSGSGTDFTLTISSLQPEDFATYYCQQSYSTPYTF |
| | | GQGTKVEIK |
| 139109-aa | 109 | MALPVTALLLPLALLLHAARPEVQLVESGGGLVQPGGSLRLSCAVSGFA |
| Full CAR | | LSNHGMSWVRRAPGKGLEWVSGIVYSGSTYYAASVKGRFTISRDNSRNT |
| | | LYLQMNSLRPEDTAIYYCSAHGGESDVWGQGTTVTVSSASGGGGSGGRA |
| | | SGGGGSDIQLTQSPSSLSASVGDRVTITCRASQSISSYLNWYQQKPGKA |
| | | PKLLIYAASSLQSGVPSRFSGSGSGTDFTLTISSLQPEDFATYYCQQSY |
| | | STPYTFGQGTKVEIKTTTPAPRPPTPAPTIASQPLSLRPEACRPAAGGA |
| | | VHTRGLDFACDIYIWAPLAGTCGVLLLSLVITLYCKRGRKKLLYIFKQP |
| | | FMRPVQTTQEEDGCSCRFPEEEEGGCELRVKFSRSADAPAYKQGQNQLY |
| | | NELNLGRREEYDVLDKRRGRDPEMGGKPRRKNPQEGLYNELQKDKMAEA |
| | | YSEIGMKGERRRGKGHDGLYQGLSTATKDTYDALHMQALPPR |
| 139109-nt | 124 | ATGGCCCTCCCTGTCACCGCCCTGCTGCTTCCGCTGGCTCTTCTGCTCC |
| Full CAR | | ACGCCGCTCGGCCCGAAGTGCAATTGGTGGAATCAGGGGGAGGACTTGT |
| | | GCAGCCTGGAGGATCGCTGAGACTGTCATGTGCCGTGTCCGGCTTTGCC |
| | | CTGTCCAACCACGGGATGTCCTGGGTCCGCCGCGCGCCTGGAAAGGGCC |
| | | TCGAATGGGTGTCGGGTATTGTGTACAGCGGTAGCACCTACTATGCCGC |
| | | ATCCGTGAAGGGGAGATTCACCATCAGCCGGGACAACTCCAGGAACACT |
| | | CTGTACCTCCAAATGAATTCGCTGAGGCCAGAGGACACTGCCATCTACT |
| | | ACTGCTCCGCGCATGGCGGAGAGTCCGACGTCTGGGGACAGGGGACCAC |
| | | CGTGACCGTGTCTAGCGCGTCCGGCGGAGGCGGCAGCGGGGGTCGGGCA |
| | | TCAGGGGGCGGCGGATCGGACATCCAGCTCACCCAGTCCCCGAGCTCGC |
| | | TGTCCGCCTCCGTGGGAGATCGGGTCACCATCACGTGCCGCGCCAGCCA |
| | | GTCGATTTCCTCCTACCTGAACTGGTACCAACAGAAGCCCGGAAAAGCC |
| | | CCGAAGCTTCTCATCTACGCCGCCTCGAGCCTGCAGTCAGGAGTGCCCT |
| | | CACGGTTCTCCGGCTCCGGTTCCGGTACTGATTTCACCCTGACCATTTC |
| | | CTCCCTGCAACCGGAGGACTTCGCTACTTACTACTGCCAGCAGTCGTAC |
| | | TCCACCCCCTACACTTTCGGACAAGGCACCAAGGTCGAAATCAAGACCA |
| | | CTACCCCAGCACCGAGGCCACCCACCCCGGCTCCTACCATCGCCTCCCA |
| | | GCCTCTGTCCCTGCGTCCGGAGGCATGTAGACCCGCAGCTGGTGGGGCC |
| | | GTGCATACCCGGGGTCTTGACTTCGCCTGCGATATCTACATTTGGGCCC |
| | | CTCTGGCTGGTACTTGCGGGGTCCTGCTGCTTTCACTCGTGATCACTCT |
| | | TTACTGTAAGCGCGGTCGGAAGAAGCTGCTGTACATCTTTAAGCAACCC |
| | | TTCATGAGGCCTGTGCAGACTACTCAAGAGGAGGACGGCTGTTCATGCC |
| | | GGTTCCCAGAGGAGGAGGAAGGCGGCTGCGAACTGCGCGTGAAATTCAG |
| | | CCGCAGCGCAGATGCTCCAGCCTACAAGCAGGGGCAGAACCAGCTCTAC |
| | | AACGAACTCAATCTTGGTCGGAGAGAGGAGTACGACGTGCTGGACAAGC |
| | | GGAGAGGACGGGACCCAGAAATGGGCGGGAAGCCGCGCAGAAAGAATCC |
| | | CCAAGAGGGCCTGTACAACGAGCTCCAAAAGGATAAGATGGCAGAAGCC |
| | | TATAGCGAGATTGGTATGAAAGGGGAACGCAGAAGAGGCAAAGGCCACG |
| | | ACGGACTGTACCAGGGACTCAGCACCGCCACCAAGGACACCTATGACGC |
| | | TCTTCACATGCAGGCCCTGCCGCCTCGG |
| Full CAR | 392 | EVQLVESGGGLVQPGGSLRLSCAVSGFALSNHGMSWVRRAPGKGLEWVS |
| without | | GIVYSGSTYYAASVKGRFTISRDNSRNTLYLQMNSLRPEDTAIYYCSAH |
| leader | | GGESDVWGQGTTVTVSSASGGGGSGGRASGGGGSDIQLTQSPSSLSASV |
| sequence | | GDRVTITCRASQSISSYLNWYQQKPGKAPKLLIYAASSLQSGVPSRFSG |
| | | SGSGTDFTLTISSLQPEDFATYYCQQSYSTPYTFGQGTKVEIKTTTPAP |
| | | RPPTPAPTIASQPLSLRPEACRPAAGGAVHTRGLDFACDIYIWAPLAGT |
| | | CGVLLLSLVITLYCKRGRKKLLYIFKQPFMRPVQTTQEEDGCSCRFPEE |
| | | EEGGCELRVKFSRSADAPAYKQGQNQLYNELNLGRREEYDVLDKRRGRD |
| | | PEMGGKPRRKNPQEGLYNELQKDKMAEAYSEIGMKGERRRGKGHDGLYQ |
| | | GLSTATKDTYDALHMQALPPR |
| Full CAR | 393 | EVQLVESGGGLVQPGGSLRLSCAVSGFALSNHGMSWVRRAPGKGLEWVS |
| without | | GIVYSGSTYYAASVKGRFTISRDNSRNTLYLQMNSLRPEDTAIYYCSAH |
| linker, | | GGESDVWGQGTTVTVSSDIQLTQSPSSLSASVGDRVTITCRASQSISSY |
| without | | LNWYQQKPGKAPKLLIYAASSLQSGVPSRFSGSGSGTDFTLTISSLQPE |
| leader | | DFATYYCQQSYSTPYTFGQGTKVEIKTTTPAPRPPTPAPTIASQPLSLR |
| sequence | | PEACRPAAGGAVHTRGLDFACDIYIWAPLAGTCGVLLLSLVITLYCKRG |
| | | RKKLLYIFKQPFMRPVQTTQEEDGCSCRFPEEEEGGCELRVKFSRSADA |
| | | PAYKQGQNQLYNELNLGRREEYDVLDKRRGRDPEMGGKPRRKNPQEGLY |
| | | NELQKDKMAEAYSEIGMKGERRRGKGHDGLYQGLSTATKDTYDALHMQA |
| | | LPPR |

139103

| | | |
|---|---|---|
| 139103-aa | 39 | QVQLVESGGGLVQPGRSLRLSCAASGFTFSNYAMSWVRQAPGKGLGWVS |
| ScFv domain | | GISRSGENTYYADSVKGRFTISRDNSKNTLYLQMNSLRDEDTAVYYCAR |
| | | SPAHYYGGMDVWGQGTTVTVSSASGGGGSGGRASGGGGSDIVLTQSPGT |
| | | LSLSPGERATLSCRASQSISSSFLAWYQQKPGQAPRLLIYGASRRATGI |
| | | PDRFSGSGSGTDFTLTISRLEPEDSAVYYCQQYHSSPSWTFGQGTKLEI |
| | | K |
| 139103-nt | 54 | CAAGTGCAACTCGTGGAATCTGGTGGAGGACTCGTGCAACCCGGAAGAT |
| ScFv domain | | CGCTTAGACTGTCGTGTGCCGCCAGCGGGTTCACTTTCTCGAACTACGC |
| | | GATGTCCTGGGTCCGCCAGGCACCCGGAAAGGGACTCGGTTGGGTGTCC |
| | | GGCATTTCCCGGTCCGGCGAAAATACCTACTACGCCGACTCCGTGAAGG |
| | | GCCGCTTCACCATCTCAAGGGACAACAGCAAAAACACCCTGTACTTGCA |
| | | AATGAACTCCCTGCGGGATGAAGATACAGCCGTGTACTATTGCGCCCGG |
| | | TCGCCTGCCCATTACTACGGCGGAATGGACGTCTGGGGACAGGGAACCA |
| | | CTGTGACTGTCAGCAGCGCGTCGGGTGGCGGCGGCTCAGGGGGTCGGGC |
| | | CTCCGGGGGGGGAGGGTCCGACATCGTGCTGACCCAGTCCCCGGGAACC |
| | | CTGAGCCTGAGCCCGGGAGAGCGCGCGACCCTGTCATGCCGGGCATCCC |
| | | AGAGCATTAGCTCCTCCTTTCTCGCCTGGTATCAGCAGAAGCCCGGACA |
| | | GGCCCCGAGGCTGCTGATCTACGGCGCTAGCAGAAGGGCTACCGGAATC |
| | | CCAGACCGGTTCTCCGGCTCCGGTTCCGGGACCGATTTCACCCTTACTA |
| | | TCTCGCGCCTGGAACCTGAGGACTCCGCCGTCTACTACTGCCAGCAGTA |
| | | CCACTCATCCCCGTCGTGGACGTTCGGACAGGGCACCAAGCTGGAGATT |
| | | AAG |
| 139103-aa | 69 | QVQLVESGGGLVQPGRSLRLSCAASGFTFSNYAMSWVRQAPGKGLGWVS |
| VH | | GISRSGENTYYADSVKGRFTISRDNSKNTLYLQMNSLRDEDTAVYYCAR |
| | | SPAHYYGGMDVWGQGTTVTVSS |
| 139103-aa | 84 | DIVLTQSPGTLSLSPGERATLSCRASQSISSSFLAWYQQKPGQAPRLLI |
| VL | | YGASRRATGIPDRFSGSGSGTDFTLTISRLEPEDSAVYYCQQYHSSPSW |
| | | TFGQGTKLEIK |
| 139103-aa | 99 | MALPVTALLLPLALLLHAARPQVQLVESGGGLVQPGRSLRLSCAASGFT |
| Full CAR | | FSNYAMSWVRQAPGKGLGWVSGISRSGENTYYADSVKGRFTISRDNSKN |
| | | TLYLQMNSLRDEDTAVYYCARSPAHYYGGMDVWGQGTTVTVSSASGGGG |
| | | SGGRASGGGGSDIVLTQSPGTLSLSPGERATLSCRASQSISSSFLAWYQ |
| | | QKPGQAPRLLIYGASRRATGIPDRFSGSGSGTDFTLTISRLEPEDSAVY |
| | | YCQQYHSSPSWTFGQGTKLEIKTTTPAPRPPTPAPTIASQPLSLRPEAC |
| | | RPAAGGAVHTRGLDFACDIYIWAPLAGTCGVLLLSLVITLYCKRGRKKL |
| | | LYIFKQPFMRPVQTTQEEDGCSCRFPEEEEGGCELRVKFSRSADAPAYK |
| | | QGQNQLYNELNLGRREEYDVLDKRRGRDPEMGGKPRRKNPQEGLYNELQ |
| | | KDKMAEAYSEIGMKGERRRGKGHDGLYQGLSTATKDTYDALHMQALPPR |
| 139103-nt | 114 | ATGGCCCTCCCTGTCACCGCCCTGCTGCTTCCGCTGGCTCTTCTGCTCC |
| Full CAR | | ACGCCGCTCGGCCCCAAGTGCAACTCGTGGAATCTGGTGGAGGACTCGT |
| | | GCAACCCGGAAGATCGCTTAGACTGTCGTGTGCCGCCAGCGGGTTCACT |
| | | TTCTCGAACTACGCGATGTCCTGGGTCCGCCAGGCACCCGGAAAGGGAC |
| | | TCGGTTGGGTGTCCGGCATTTCCCGGTCCGGCGAAAATACCTACTACGC |
| | | CGACTCCGTGAAGGGCCGCTTCACCATCTCAAGGGACAACAGCAAAAAC |
| | | ACCCTGTACTTGCAAATGAACTCCCTGCGGGATGAAGATACAGCCGTGT |
| | | ACTATTGCGCCCGGTCGCCTGCCCATTACTACGGCGGAATGGACGTCTG |
| | | GGGACAGGGAACCACTGTGACTGTCAGCAGCGCGTCGGGTGGCGGCGGC |
| | | TCAGGGGGTCGGGCCTCCGGGGGGGGAGGGTCCGACATCGTGCTGACCC |
| | | AGTCCCCGGGAACCCTGAGCCTGAGCCCGGGAGAGCGCGCGACCCTGTC |
| | | ATGCCGGGCATCCCAGAGCATTAGCTCCTCCTTTCTCGCCTGGTATCAG |
| | | CAGAAGCCCGGACAGGCCCCGAGGCTGCTGATCTACGGCGCTAGCAGAA |
| | | GGGCTACCGGAATCCCAGACCGGTTCTCCGGCTCCGGTTCCGGGACCGA |
| | | TTTCACCCTTACTATCTCGCGCCTGGAACCTGAGGACTCCGCCGTCTAC |
| | | TACTGCCAGCAGTACCACTCATCCCCGTCGTGGACGTTCGGACAGGGCA |
| | | CCAAGCTGGAGATTAAGACCACTACCCCAGCACCGAGGCCACCCACCCC |
| | | GGCTCCTACCATCGCCTCCCAGCCTCTGTCCCTGCGTCCGGAGGCATGT |
| | | AGACCCGCAGCTGGTGGGGCCGTGCATACCCGGGGTCTTGACTTCGCCT |
| | | GCGATATCTACATTTGGGCCCCTCTGGCTGGTACTTGCGGGGTCCTGCT |
| | | GCTTTCACTCGTGATCACTCTTTACTGTAAGCGCGGTCGGAAGAAGCTG |
| | | CTGTACATCTTTAAGCAACCCTTCATGAGGCCTGTGCAGACTACTCAAG |
| | | AGGAGGACGGCTGTTCATGCCGGTTCCCAGAGGAGGAGGAAGGCGGCTG |
| | | CGAACTGCGCGTGAAATTCAGCCGCAGCGCAGATGCTCCAGCCTACAAG |
| | | CAGGGGCAGAACCAGCTCTACAACGAACTCAATCTTGGTCGGAGAGAGG |
| | | AGTACGACGTGCTGGACAAGCGGAGAGGACGGGACCCAGAAATGGGCGG |
| | | GAAGCCGCGCAGAAAGAATCCCCAAGAGGGCCTGTACAACGAGCTCCAA |
| | | AAGGATAAGATGGCAGAAGCCTATAGCGAGATTGGTATGAAAGGGGAAC |
| | | GCAGAAGAGGCAAAGGCCACGACGGACTGTACCAGGGACTCAGCACCGC |
| | | CACCAAGGACACCTATGACGCTCTTCACATGCAGGCCCTGCCGCCTCGG |

139105

| | | |
|---|---|---|
| 139105-aa | 40 | QVQLVESGGGLVQPGRSLRLSCAASGFTFDDYAMHWVRQAPGKGLEWVS |
| ScFv domain | | GISWNSGSIGYADSVKGRFTISRDNAKNSLYLQMNSLRAEDTALYYCSV |
| | | HSFLAYWGQGTLVTVSSASGGGGSGGRASGGGGSDIVMTQTPLSLPVTP |
| | | GEPASISCRSSQSLLHSNGYNYLDWYLQKPGQSPQLLIYLGSNRASGVP |
| | | DRFSGSGSGTDFTLKISRVEAEDVGVYYCMQALQTPYTFGQGTKVEIK |
| 139105-nt | 55 | CAAGTGCAACTCGTCGAATCCGGTGGAGGTCTGGTCCAACCTGGTAGAA |
| ScFv domain | | GCCTGAGACTGTCGTGTGCGGCCAGCGGATTCACCTTTGATGACTATGC |
| | | TATGCACTGGGTGCGGCAGGCCCCAGGAAAGGGCCTGGAATGGGTGTCG |
| | | GGAATTAGCTGGAACTCCGGGTCCATTGGCTACGCCGACTCCGTGAAGG |
| | | GCCGCTTCACCATCTCCCGCGACAACGCAAAGAACTCCCTGTACTTGCA |
| | | AATGAACTCGCTCAGGGCTGAGGATACCGCGCTGTACTACTGCTCCGTG |
| | | CATTCCTTCCTGGCCTACTGGGGACAGGGAACTCTGGTCACCGTGTCGA |
| | | GCGCCTCCGGCGGCGGGGGCTCGGGTGGACGGGCCTCGGGCGGAGGGGG |
| | | GTCCGACATCGTGATGACCCAGACCCCGCTGAGCTTGCCCGTGACTCCC |
| | | GGAGAGCCTGCATCCATCTCCTGCCGGTCATCCCAGTCCCTTCTCCACT |
| | | CCAACGGATACAACTACCTCGACTGGTACCTCCAGAAGCCGGGACAGAG |
| | | CCCTCAGCTTCTGATCTACCTGGGGTCAAATAGAGCCTCAGGAGTGCCG |
| | | GATCGGTTCAGCGGATCTGGTTCGGGAACTGATTTCACTCTGAAGATTT |
| | | CCCGCGTGGAAGCCGAGGACGTGGGCGTCTACTACTGTATGCAGGCGCT |
| | | GCAGACCCCCTATACCTTCGGCCAAGGGACGAAAGTGGAGATCAAG |
| 139105-aa | 70 | QVQLVESGGGLVQPGRSLRLSCAASGFTFDDYAMHWVRQAPGKGLEWVS |
| VH | | GISWNSGSIGYADSVKGRFTISRDNAKNSLYLQMNSLRAEDTALYYCSV |
| | | HSFLAYWGQGTLVTVSS |
| 139105-aa | 85 | DIVMTQTPLSLPVTPGEPASISCRSSQSLLHSNGYNYLDWYLQKPGQSP |
| VL | | QLLIYLGSNRASGVPDRFSGSGSGTDFTLKISRVEAEDVGVYYCMQALQ |
| | | TPYTFGQGTKVEIK |
| 139105-aa | 100 | MALPVTALLLPLALLLHAARPQVQLVESGGGLVQPGRSLRLSCAASGFT |
| Full CAR | | FDDYAMHWVRQAPGKGLEWVSGISWNSGSIGYADSVKGRFTISRDNAKN |
| | | SLYLQMNSLRAEDTALYYCSVHSFLAYWGQGTLVTVSSASGGGGSGGRA |
| | | SGGGGSDIVMTQTPLSLPVTPGEPASISCRSSQSLLHSNGYNYLDWYLQ |
| | | KPGQSPQLLIYLGSNRASGVPDRFSGSGSGTDFTLKISRVEAEDVGVYY |
| | | CMQALQTPYTFGQGTKVEIKTTTPAPRPPTPAPTIASQPLSLRPEACRP |
| | | AAGGAVHTRGLDFACDIYIWAPLAGTCGVLLLSLVITLYCKRGRKKLLY |
| | | IFKQPFMRPVQTTQEEDGCSCRFPEEEEGGCELRVKFSRSADAPAYKQG |
| | | QNQLYNELNLGRREEYDVLDKRRGRDPEMGGKPRRKNPQEGLYNELQKD |
| | | KMAEAYSEIGMKGERRRGKGHDGLYQGLSTATKDTYDALHMQALPPR |
| 139105-nt | 115 | ATGGCCCTCCCTGTCACCGCCCTGCTGCTTCCGCTGGCTCTTCTGCTCC |
| Full CAR | | ACGCCGCTCGGCCCCAAGTGCAACTCGTCGAATCCGGTGGAGGTCTGGT |
| | | CCAACCTGGTAGAAGCCTGAGACTGTCGTGTGCGGCCAGCGGATTCACC |
| | | TTTGATGACTATGCTATGCACTGGGTGCGGCAGGCCCCAGGAAAGGGCC |
| | | TGGAATGGGTGTCGGGAATTAGCTGGAACTCCGGGTCCATTGGCTACGC |
| | | CGACTCCGTGAAGGGCCGCTTCACCATCTCCCGCGACAACGCAAAGAAC |
| | | TCCCTGTACTTGCAAATGAACTCGCTCAGGGCTGAGGATACCGCGCTGT |
| | | ACTACTGCTCCGTGCATTCCTTCCTGGCCTACTGGGGACAGGGAACTCT |
| | | GGTCACCGTGTCGAGCGCCTCCGGCGGCGGGGGCTCGGGTGGACGGGCC |
| | | TCGGGCGGAGGGGGGTCCGACATCGTGATGACCCAGACCCCGCTGAGCT |
| | | TGCCCGTGACTCCCGGAGAGCCTGCATCCATCTCCTGCCGGTCATCCCA |
| | | GTCCCTTCTCCACTCCAACGGATACAACTACCTCGACTGGTACCTCCAG |
| | | AAGCCGGGACAGAGCCCTCAGCTTCTGATCTACCTGGGGTCAAATAGAG |
| | | CCTCAGGAGTGCCGGATCGGTTCAGCGGATCTGGTTCGGGAACTGATTT |
| | | CACTCTGAAGATTTCCCGCGTGGAAGCCGAGGACGTGGGCGTCTACTAC |
| | | TGTATGCAGGCGCTGCAGACCCCCTATACCTTCGGCCAAGGGACGAAAG |
| | | TGGAGATCAAGACCACTACCCCAGCACCGAGGCCACCCACCCCGGCTCC |
| | | TACCATCGCCTCCCAGCCTCTGTCCCTGCGTCCGGAGGCATGTAGACCC |
| | | GCAGCTGGTGGGGCCGTGCATACCCGGGGTCTTGACTTCGCCTGCGATA |
| | | TCTACATTTGGGCCCCTCTGGCTGGTACTTGCGGGGTCCTGCTGCTTTC |
| | | ACTCGTGATCACTCTTTACTGTAAGCGCGGTCGGAAGAAGCTGCTGTAC |
| | | ATCTTTAAGCAACCCTTCATGAGGCCTGTGCAGACTACTCAAGAGGAGG |
| | | ACGGCTGTTCATGCCGGTTCCCAGAGGAGGAGGAAGGCGGCTGCGAACT |
| | | GCGCGTGAAATTCAGCCGCAGCGCAGATGCTCCAGCCTACAAGCAGGGG |
| | | CAGAACCAGCTCTACAACGAACTCAATCTTGGTCGGAGAGAGGAGTACG |
| | | ACGTGCTGGACAAGCGGAGAGGACGGGACCCAGAAATGGGCGGGAAGCC |
| | | GCGCAGAAAGAATCCCCAAGAGGGCCTGTACAACGAGCTCCAAAAGGAT |
| | | AAGATGGCAGAAGCCTATAGCGAGATTGGTATGAAAGGGGAACGCAGAA |
| | | GAGGCAAAGGCCACGACGGACTGTACCAGGGACTCAGCACCGCCACCAA |
| | | GGACACCTATGACGCTCTTCACATGCAGGCCCTGCCGCCTCGG |

139111

| | | |
|---|---|---|
| 139111-aa | 41 | EVQLLESGGGLVQPGGSLRLSCAVSGFALSNHGMSWVRRAPGKGLEWVS |
| ScFv domain | | GIVYSGSTYYAASVKGRFTISRDNSRNTLYLQMNSLRPEDTAIYYCSAH |
| | | GGESDVWGQGTTVTVSSASGGGGSGGRASGGGGSDIVMTQTPLSLSVTP |
| | | GQPASISCKSSQSLLRNDGKTPLYWYLQKAGQPPQLLIYEVSNRFSGVP |
| | | DRFSGSGSGTDFTLKISRVEAEDVGAYYCMQNIQFPSFGGGTKLEIK |
| 139111-nt | 56 | GAAGTGCAATTGTTGGAATCTGGAGGAGGACTTGTGCAGCCTGGAGGAT |
| ScFv domain | | CACTGAGACTTTCGTGTGCGGTGTCAGGCTTCGCCCTGAGCAACCACGG |
| | | CATGAGCTGGGTGCGGAGAGCCCCGGGGAAGGGTCTGGAATGGGTGTCC |
| | | GGGATCGTCTACTCCGGTTCAACTTACTACGCCGCAAGCGTGAAGGGTC |
| | | GCTTCACCATTTCCCGCGATAACTCCCGGAACACCCTGTACCTCCAAAT |
| | | GAACTCCCTGCGGCCCGAGGACACCGCCATCTACTACTGTTCCGCGCAT |
| | | GGAGGAGAGTCCGATGTCTGGGGACAGGGCACTACCGTGACCGTGTCGA |
| | | GCGCCTCGGGGGGAGGAGGCTCCGGCGGTCGCGCCTCCGGGGGGGGTGG |
| | | CAGCGACATTGTGATGACGCAGACTCCACTCTCGCTGTCCGTGACCCCG |
| | | GGACAGCCCGCGTCCATCTCGTGCAAGAGCTCCCAGAGCCTGCTGAGGA |
| | | ACGACGGAAAGACTCCTCTGTATTGGTACCTCCAGAAGGCTGGACAGCC |
| | | CCCGCAACTGCTCATCTACGAAGTGTCAAATCGCTTCTCCGGGGTGCCG |
| | | GATCGGTTTTCCGGCTCGGGATCGGGCACCGACTTCACCCTGAAAATCT |
| | | CCAGGGTCGAGGCCGAGGACGTGGGAGCCTACTACTGCATGCAAAACAT |
| | | CCAGTTCCCTTCCTTCGGCGGCGGCACAAAGCTGGAGATTAAG |
| 139111-aa | 71 | EVQLLESGGGLVQPGGSLRLSCAVSGFALSNHGMSWVRRAPGKGLEWVS |
| VH | | GIVYSGSTYYAASVKGRFTISRDNSRNTLYLQMNSLRPEDTAIYYCSAH |
| | | GGESDVWGQGTTVTVSS |
| 139111-aa | 86 | DIVMTQTPLSLSVTPGQPASISCKSSQSLLRNDGKTPLYWYLQKAGQPP |
| VL | | QLLIYEVSNRFSGVPDRFSGSGSGTDFTLKISRVEAEDVGAYYCMQNIQ |
| | | FPSFGGGTKLEIK |
| 139111-aa | 101 | MALPVTALLLPLALLLHAARPEVQLLESGGGLVQPGGSLRLSCAVSGFA |
| Full CAR | | LSNHGMSWVRRAPGKGLEWVSGIVYSGSTYYAASVKGRFTISRDNSRNT |
| | | LYLQMNSLRPEDTAIYYCSAHGGESDVWGQGTTVTVSSASGGGGSGGRA |
| | | SGGGGSDIVMTQTPLSLSVTPGQPASISCKSSQSLLRNDGKTPLYWYLQ |
| | | KAGQPPQLLIYEVSNRFSGVPDRFSGSGSGTDFTLKISRVEAEDVGAYY |
| | | CMQNIQFPSFGGGTKLEIKTTTPAPRPPTPAPTIASQPLSLRPEACRPA |
| | | AGGAVHTRGLDFACDIYIWAPLAGTCGVLLLSLVITLYCKRGRKKLLYI |
| | | FKQPFMRPVQTTQEEDGCSCRFPEEEEGGCELRVKFSRSADAPAYKQGQ |
| | | NQLYNELNLGRREEYDVLDKRRGRDPEMGGKPRRKNPQEGLYNELQKDK |
| | | [sequence omitted] |
| 139111-nt | 116 | ATGGCCCTCCCTGTCACCGCCCTGCTGCTTCCGCTGGCTCTTCTGCTCC |
| Full CAR | | ACGCCGCTCGGCCCGAAGTGCAATTGTTGGAATCTGGAGGAGGACTTGT |
| | | GCAGCCTGGAGGATCACTGAGACTTTCGTGTGCGGTGTCAGGCTTCGCC |
| | | CTGAGCAACCACGGCATGAGCTGGGTGCGGAGAGCCCCGGGGAAGGGTC |
| | | TGGAATGGGTGTCCGGGATCGTCTACTCCGGTTCAACTTACTACGCCGC |
| | | AAGCGTGAAGGGTCGCTTCACCATTTCCCGCGATAACTCCCGGAACACC |
| | | CTGTACCTCCAAATGAACTCCCTGCGGCCCGAGGACACCGCCATCTACT |
| | | ACTGTTCCGCGCATGGAGGAGAGTCCGATGTCTGGGGACAGGGCACTAC |
| | | CGTGACCGTGTCGAGCGCCTCGGGGGGAGGAGGCTCCGGCGGTCGCGCC |
| | | TCCGGGGGGGGTGGCAGCGACATTGTGATGACGCAGACTCCACTCTCGC |
| | | TGTCCGTGACCCCGGGACAGCCCGCGTCCATCTCGTGCAAGAGCTCCCA |
| | | GAGCCTGCTGAGGAACGACGGAAAGACTCCTCTGTATTGGTACCTCCAG |
| | | AAGGCTGGACAGCCCCCGCAACTGCTCATCTACGAAGTGTCAAATCGCT |
| | | TCTCCGGGGTGCCGGATCGGTTTTCCGGCTCGGGATCGGGCACCGACTT |
| | | CACCCTGAAAATCTCCAGGGTCGAGGCCGAGGACGTGGGAGCCTACTAC |
| | | TGCATGCAAAACATCCAGTTCCCTTCCTTCGGCGGCGGCACAAAGCTGG |
| | | AGATTAAGACCACTACCCCAGCACCGAGGCCACCCACCCCGGCTCCTAC |
| | | CATCGCCTCCCAGCCTCTGTCCCTGCGTCCGGAGGCATGTAGACCCGCA |
| | | GCTGGTGGGGCCGTGCATACCCGGGGTCTTGACTTCGCCTGCGATATCT |
| | | ACATTTGGGCCCCTCTGGCTGGTACTTGCGGGGTCCTGCTGCTTTCACT |
| | | CGTGATCACTCTTTACTGTAAGCGCGGTCGGAAGAAGCTGCTGTACATC |
| | | TTTAAGCAACCCTTCATGAGGCCTGTGCAGACTACTCAAGAGGAGGACG |
| | | GCTGTTCATGCCGGTTCCCAGAGGAGGAGGAAGGCGGCTGCGAACTGCG |
| | | CGTGAAATTCAGCCGCAGCGCAGATGCTCCAGCCTACAAGCAGGGGCAG |
| | | AACCAGCTCTACAACGAACTCAATCTTGGTCGGAGAGAGGAGTACGACG |
| | | TGCTGGACAAGCGGAGAGGACGGGACCCAGAAATGGGCGGGAAGCCGCG |
| | | CAGAAAGAATCCCCAAGAGGGCCTGTACAACGAGCTCCAAAAGGATAAG |
| | | ATGGCAGAAGCCTATAGCGAGATTGGTATGAAAGGGGAACGCAGAAGAG |
| | | GCAAAGGCCACGACGGACTGTACCAGGGACTCAGCACCGCCACCAAGGA |
| | | CACCTATGACGCTCTTCACATGCAGGCCCTGCCGCCTCGG |

139100

| | | |
|---|---|---|
| 139100-aa | 42 | QVQLVQSGAEVRKTGASVKVSCKASGYIFDNFGINWVRQAPGQGLEWMG |
| ScFv domain | | WINPKNNNTNYAQKFQGRVTITADESTNTAYMEVSSLRSEDTAVYYCAR |
| | | GPYYYQSYMDVWGQGTMVTVSSASGGGGSGGRASGGGGSDIVMTQTPLS |
| | | LPVTPGEPASISCRSSQSLLHSNGYNYLNWYLQKPGQSPQLLIYLGSKR |
| | | ASGVPDRFSGSGSGTDFTLHITRVGAEDVGVYYCMQALQTPYTFGQGTK |
| | | LEIK |
| 139100-nt | 57 | CAAGTCCAACTCGTCCAGTCCGGCGCAGAAGTCAGAAAAACCGGTGCTA |
| ScFv domain | | GCGTGAAAGTGTCCTGCAAGGCCTCCGGCTACATTTTCGATAACTTCGG |
| | | AATCAACTGGGTCAGACAGGCCCCGGGCCAGGGGCTGGAATGGATGGGA |
| | | TGGATCAACCCCAAGAACAACAACACCAACTACGCACAGAAGTTCCAGG |
| | | GCCGCGTGACTATCACCGCCGATGAATCGACCAATACCGCCTACATGGA |
| | | GGTGTCCTCCCTGCGGTCGGAGGACACTGCCGTGTATTACTGCGCGAGG |
| | | GGCCCATACTACTACCAAAGCTACATGGACGTCTGGGGACAGGGAACCA |
| | | TGGTGACCGTGTCATCCGCCTCCGGTGGTGGAGGCTCCGGGGGGCGGGC |
| | | TTCAGGAGGCGGAGGAAGCGATATTGTGATGACCCAGACTCCGCTTAGC |
| | | CTGCCCGTGACTCCTGGAGAACCGGCCTCCATTTCCTGCCGGTCCTCGC |
| | | AATCACTCCTGCATTCCAACGGTTACAACTACCTGAATTGGTACCTCCA |
| | | GAAGCCTGGCCAGTCGCCCCAGTTGCTGATCTATCTGGGCTCGAAGCGC |
| | | GCCTCCGGGGTGCCTGACCGGTTTAGCGGATCTGGGAGCGGCACGGACT |
| | | TCACTCTCCACATCACCCGCGTGGGAGCGGAGGACGTGGGAGTGTACTA |
| | | CTGTATGCAGGCGCTGCAGACTCCGTACACATTCGGACAGGGCACCAAG |
| | | CTGGAGATCAAG |
| 139100-aa | 72 | QVQLVQSGAEVRKTGASVKVSCKASGYIFDNFGINWVRQAPGQGLEWMG |
| VH | | WINPKNNNTNYAQKFQGRVTITADESTNTAYMEVSSLRSEDTAVYYCAR |
| | | GPYYYQSYMDVWGQGTMVTVSS |
| 139100-aa | 87 | DIVMTQTPLSLPVTPGEPASISCRSSQSLLHSNGYNYLNWYLQKPGQSP |
| VL | | QLLIYLGSKRASGVPDRFSGSGSGTDFTLHITRVGAEDVGVYYCMQALQ |
| | | TPYTFGQGTKLEIK |
| 139100-aa | 102 | MALPVTALLLPLALLLHAARPQVQLVQSGAEVRKTGASVKVSCKASGYI |
| Full CAR | | FDNFGINWVRQAPGQGLEWMGWINPKNNNTNYAQKFQGRVTITADESTN |
| | | TAYMEVSSLRSEDTAVYYCARGPYYYQSYMDVWGQGTMVTVSSASGGGG |
| | | SGGRASGGGGSDIVMTQTPLSLPVTPGEPASISCRSSQSLLHSNGYNYL |
| | | NWYLQKPGQSPQLLIYLGSKRASGVPDRFSGSGSGTDFTLHITRVGAED |
| | | VGVYYCMQALQTPYTFGQGTKLEIKTTTPAPRPPTPAPTIASQPLSLRP |
| | | EACRPAAGGAVHTRGLDFACDIYIWAPLAGTCGVLLLSLVITLYCKRGR |
| | | KKLLYIFKQPFMRPVQTTQEEDGCSCRFPEEEEGGCELRVKFSRSADAP |
| | | AYKQGQNQLYNELNLGRREEYDVLDKRRGRDPEMGGKPRRKNPQEGLYN |
| | | ELQKDKMAEAYSEIGMKGERRRGKGHDGLYQGLSTATKDTYDALHMQAL |
| | | PPR |
| 139100-nt | 117 | ATGGCCCTCCCTGTCACCGCCCTGCTGCTTCCGCTGGCTCTTCTGCTCC |
| Full CAR | | ACGCCGCTCGGCCCCAAGTCCAACTCGTCCAGTCCGGCGCAGAAGTCAG |
| | | AAAAACCGGTGCTAGCGTGAAAGTGTCCTGCAAGGCCTCCGGCTACATT |
| | | TTCGATAACTTCGGAATCAACTGGGTCAGACAGGCCCCGGGCCAGGGGC |
| | | TGGAATGGATGGGATGGATCAACCCCAAGAACAACAACACCAACTACGC |
| | | ACAGAAGTTCCAGGGCCGCGTGACTATCACCGCCGATGAATCGACCAAT |
| | | ACCGCCTACATGGAGGTGTCCTCCCTGCGGTCGGAGGACACTGCCGTGT |
| | | ATTACTGCGCGAGGGGCCCATACTACTACCAAAGCTACATGGACGTCTG |
| | | GGGACAGGGAACCATGGTGACCGTGTCATCCGCCTCCGGTGGTGGAGGC |
| | | TCCGGGGGGCGGGCTTCAGGAGGCGGAGGAAGCGATATTGTGATGACCC |
| | | AGACTCCGCTTAGCCTGCCCGTGACTCCTGGAGAACCGGCCTCCATTTC |
| | | CTGCCGGTCCTCGCAATCACTCCTGCATTCCAACGGTTACAACTACCTG |
| | | AATTGGTACCTCCAGAAGCCTGGCCAGTCGCCCCAGTTGCTGATCTATC |
| | | TGGGCTCGAAGCGCGCCTCCGGGGTGCCTGACCGGTTTAGCGGATCTGG |
| | | GAGCGGCACGGACTTCACTCTCCACATCACCCGCGTGGGAGCGGAGGAC |
| | | GTGGGAGTGTACTACTGTATGCAGGCGCTGCAGACTCCGTACACATTCG |
| | | GACAGGGCACCAAGCTGGAGATCAAGACCACTACCCCAGCACCGAGGCC |
| | | ACCCACCCCGGCTCCTACCATCGCCTCCCAGCCTCTGTCCCTGCGTCCG |
| | | GAGGCATGTAGACCCGCAGCTGGTGGGGCCGTGCATACCCGGGGTCTTG |
| | | ACTTCGCCTGCGATATCTACATTTGGGCCCCTCTGGCTGGTACTTGCGG |
| | | GGTCCTGCTGCTTTCACTCGTGATCACTCTTTACTGTAAGCGCGGTCGG |
| | | AAGAAGCTGCTGTACATCTTTAAGCAACCCTTCATGAGGCCTGTGCAGA |
| | | CTACTCAAGAGGAGGACGGCTGTTCATGCCGGTTCCCAGAGGAGGAGGA |
| | | AGGCGGCTGCGAACTGCGCGTGAAATTCAGCCGCAGCGCAGATGCTCCA |
| | | GCCTACAAGCAGGGGCAGAACCAGCTCTACAACGAACTCAATCTTGGTC |
| | | GGAGAGAGGAGTACGACGTGCTGGACAAGCGGAGAGGACGGGACCCAGA |
| | | AATGGGCGGGAAGCCGCGCAGAAAGAATCCCCAAGAGGGCCTGTACAAC |
| | | GAGCTCCAAAAGGATAAGATGGCAGAAGCCTATAGCGAGATTGGTATGA |
| | | AAGGGGAACGCAGAAGAGGCAAAGGCCACGACGGACTGTACCAGGGACT |
| | | CAGCACCGCCACCAAGGACACCTATGACGCTCTTCACATGCAGGCCCTG |
| | | CCGCCTCGG |

139101

| | | |
|---|---|---|
| 139101-aa | 43 | QVQLQESGGGLVQPGGSLRLSCAASGFTFSSDAMTWVRQAPGKGLEWVS |
| ScFv domain | | VISGSGGTTYYADSVKGRFTISRDNSKNTLYLQMNSLRAEDTAVYYCAK |
| | | LDSSGYYYARGPRYWGQGTLVTVSSASGGGGSGGRASGGGGSDIQLTQS |
| | | PSSLSASVGDRVTITCRASQSISSYLNWYQQKPGKAPKLLIYGASTLAS |
| | | GVPARFSGSGSGTHFTLTINSLQSEDSATYYCQQSYKRASFGQGTKVEI |
| | | K |
| 139101-nt | 58 | CAAGTGCAACTTCAAGAATCAGGCGGAGGACTCGTGCAGCCCGGAGGAT |
| ScFv domain | | CATTGCGGCTCTCGTGCGCCGCCTCGGGCTTCACCTTCTCGAGCGACGC |
| | | CATGACCTGGGTCCGCCAGGCCCCGGGGAAGGGGCTGGAATGGGTGTCT |
| | | GTGATTTCCGGCTCCGGGGGAACTACGTACTACGCCGATTCCGTGAAAG |
| | | GTCGCTTCACTATCTCCCGGGACAACAGCAAGAACACCCTTTATCTGCA |
| | | AATGAATTCCCTCCGCGCCGAGGACACCGCCGTGTACTACTGCGCCAAG |
| | | CTGGACTCCTCGGGCTACTACTATGCCCGGGGTCCGAGATACTGGGGAC |
| | | AGGGAACCCTCGTGACCGTGTCCTCCGCGTCCGGCGGAGGAGGGTCGGG |
| | | AGGGCGGGCCTCCGGCGGCGGCGGTTCGGACATCCAGCTGACCCAGTCC |
| | | CCATCCTCACTGAGCGCAAGCGTGGGCGACAGAGTCACCATTACATGCA |
| | | GGGCGTCCCAGAGCATCAGCTCCTACCTGAACTGGTACCAACAGAAGCC |
| | | TGGAAAGGCTCCTAAGCTGTTGATCTACGGGGCTTCGACCCTGGCATCC |
| | | GGGGTGCCCGCGAGGTTTAGCGGAAGCGGTAGCGGCACTCACTTCACTC |
| | | TGACCATTAACAGCCTCCAGTCCGAGGATTCAGCCACTTACTACTGTCA |
| | | GCAGTCCTACAAGCGGGCCAGCTTCGGACAGGGCACTAAGGTCGAGATC |
| | | AAG |
| 139101-aa | 73 | QVQLQESGGGLVQPGGSLRLSCAASGFTFSSDAMTWVRQAPGKGLEWVS |
| VH | | VISGSGGTTYYADSVKGRFTISRDNSKNTLYLQMNSLRAEDTAVYYCAK |
| | | LDSSGYYYARGPRYWGQGTLVTVSS |
| 139101-aa | 88 | DIQLTQSPSSLSASVGDRVTITCRASQSISSYLNWYQQKPGKAPKLLIY |
| VL | | GASTLASGVPARFSGSGSGTHFTLTINSLQSEDSATYYCQQSYKRASFG |
| | | QGTKVEIK |
| 139101-aa | 103 | MALPVTALLLPLALLLHAARPQVQLQESGGGLVQPGGSLRLSCAASGFT |
| Full CAR | | FSSDAMTWVRQAPGKGLEWVSVISGSGGTTYYADSVKGRFTISRDNSKN |
| | | TLYLQMNSLRAEDTAVYYCAKLDSSGYYYARGPRYWGQGTLVTVSSASG |
| | | GGGSGGRASGGGGSDIQLTQSPSSLSASVGDRVTITCRASQSISSYLNW |
| | | YQQKPGKAPKLLIYGASTLASGVPARFSGSGSGTHFTLTINSLQSEDSA |
| | | TYYCQQSYKRASFGQGTKVEIKTTTPAPRPPTPAPTIASQPLSLRPEAC |
| | | RPAAGGAVHTRGLDFACDIYIWAPLAGTCGVLLLSLVITLYCKRGRKKL |
| | | LYIFKQPFMRPVQTTQEEDGCSCRFPEEEEGGCELRVKFSRSADAPAYK |
| | | QGQNQLYNELNLGRREEYDVLDKRRGRDPEMGGKPRRKNPQEGLYNELQ |
| | | KDKMAEAYSEIGMKGERRRGKGHDGLYQGLSTATKDTYDALHMQALPPR |
| 139101-nt | 118 | ATGGCCCTCCCTGTCACCGCCCTGCTGCTTCCGCTGGCTCTTCTGCTCC |
| Full CAR | | ACGCCGCTCGGCCCCAAGTGCAACTTCAAGAATCAGGCGGAGGACTCGT |
| | | GCAGCCCGGAGGATCATTGCGGCTCTCGTGCGCCGCCTCGGGCTTCACC |
| | | TTCTCGAGCGACGCCATGACCTGGGTCCGCCAGGCCCCGGGGAAGGGGC |
| | | TGGAATGGGTGTCTGTGATTTCCGGCTCCGGGGGAACTACGTACTACGC |
| | | CGATTCCGTGAAAGGTCGCTTCACTATCTCCCGGGACAACAGCAAGAAC |
| | | ACCCTTTATCTGCAAATGAATTCCCTCCGCGCCGAGGACACCGCCGTGT |
| | | ACTACTGCGCCAAGCTGGACTCCTCGGGCTACTACTATGCCCGGGGTCC |
| | | GAGATACTGGGGACAGGGAACCCTCGTGACCGTGTCCTCCGCGTCCGGC |
| | | GGAGGAGGGTCGGGAGGGCGGGCCTCCGGCGGCGGCGGTTCGGACATCC |
| | | AGCTGACCCAGTCCCCATCCTCACTGAGCGCAAGCGTGGGCGACAGAGT |
| | | CACCATTACATGCAGGGCGTCCCAGAGCATCAGCTCCTACCTGAACTGG |
| | | TACCAACAGAAGCCTGGAAAGGCTCCTAAGCTGTTGATCTACGGGGCTT |
| | | CGACCCTGGCATCCGGGGTGCCCGCGAGGTTTAGCGGAAGCGGTAGCGG |
| | | CACTCACTTCACTCTGACCATTAACAGCCTCCAGTCCGAGGATTCAGCC |
| | | ACTTACTACTGTCAGCAGTCCTACAAGCGGGCCAGCTTCGGACAGGGCA |
| | | CTAAGGTCGAGATCAAGACCACTACCCCAGCACCGAGGCCACCCACCCC |
| | | GGCTCCTACCATCGCCTCCCAGCCTCTGTCCCTGCGTCCGGAGGCATGT |
| | | AGACCCGCAGCTGGTGGGGCCGTGCATACCCGGGGTCTTGACTTCGCCT |
| | | GCGATATCTACATTTGGGCCCCTCTGGCTGGTACTTGCGGGGTCCTGCT |
| | | GCTTTCACTCGTGATCACTCTTTACTGTAAGCGCGGTCGGAAGAAGCTG |
| | | CTGTACATCTTTAAGCAACCCTTCATGAGGCCTGTGCAGACTACTCAAG |
| | | AGGAGGACGGCTGTTCATGCCGGTTCCCAGAGGAGGAGGAAGGCGGCTG |
| | | CGAACTGCGCGTGAAATTCAGCCGCAGCGCAGATGCTCCAGCCTACAAG |
| | | CAGGGGCAGAACCAGCTCTACAACGAACTCAATCTTGGTCGGAGAGAGG |
| | | AGTACGACGTGCTGGACAAGCGGAGAGGACGGGACCCAGAAATGGGCGG |
| | | GAAGCCGCGCAGAAAGAATCCCCAAGAGGGCCTGTACAACGAGCTCCAA |
| | | AAGGATAAGATGGCAGAAGCCTATAGCGAGATTGGTATGAAAGGGGAAC |
| | | GCAGAAGAGGCAAAGGCCACGACGGACTGTACCAGGGACTCAGCACCGC |
| | | CACCAAGGACACCTATGACGCTCTTCACATGCAGGCCCTGCCGCCTCGG |

139102

| | | |
|---|---|---|
| 139102-aa | 44 | QVQLVQSGAEVKKPGASVKVSCKASGYTFSNYGITWVRQAPGQGLEWMG |
| ScFv domain | | WISAYNGNTNYAQKFQGRVTMTRNTSISTAYMELSSLRSEDTAVYYCAR |
| | | GPYYYYMDVWGKGTMVTVSSASGGGGSGGRASGGGGSEIVMTQSPLSLP |
| | | VTPGEPASISCRSSQSLLYSNGYNYVDWYLQKPGQSPQLLIYLGSNRAS |
| | | GVPDRFSGSGSGTDFKLQISRVEAEDVGIYYCMQGRQFPYSFGQGTKVE |
| | | IK |
| 139102-nt | 59 | CAAGTCCAACTGGTCCAGAGCGGTGCAGAAGTGAAGAAGCCCGGAGCGA |
| ScFv domain | | GCGTGAAAGTGTCCTGCAAGGCTTCCGGGTACACCTTCTCCAACTACGG |
| | | CATCACTTGGGTGCGCCAGGCCCCGGGACAGGGCCTGGAATGGATGGGG |
| | | TGGATTTCCGCGTACAACGGCAATACGAACTACGCTCAGAAGTTCCAGG |
| | | GTAGAGTGACCATGACTAGGAACACCTCCATTTCCACCGCCTACATGGA |
| | | ACTGTCCTCCCTGCGGAGCGAGGACACCGCCGTGTACTATTGCGCCCGG |
| | | GGACCATACTACTACTACATGGATGTCTGGGGGAAGGGGACTATGGTCA |
| | | CCGTGTCATCCGCCTCGGGAGGCGGCGGATCAGGAGGACGCGCCTCTGG |
| | | TGGTGGAGGATCGGAGATCGTGATGACCCAGAGCCCTCTCTCCTTGCCC |
| | | GTGACTCCTGGGGAGCCCGCATCCATTTCATGCCGGAGCTCCCAGTCAC |
| | | TTCTCTACTCCAACGGCTATAACTACGTGGATTGGTACCTCCAAAAGCC |
| | | GGGCCAGAGCCCGCAGCTGCTGATCTACCTGGGCTCGAACAGGGCCAGC |
| | | GGAGTGCCTGACCGGTTCTCCGGGTCGGGAAGCGGGACCGACTTCAAGC |
| | | TGCAAATCTCGAGAGTGGAGGCCGAGGACGTGGGAATCTACTACTGTAT |
| | | GCAGGGCCGCCAGTTTCCGTACTCGTTCGGACAGGGCACCAAAGTGGAA |
| | | ATCAAG |
| 139102-aa | 74 | QVQLVQSGAEVKKPGASVKVSCKASGYTFSNYGITWVRQAPGQGLEWMG |
| VH | | WISAYNGNTNYAQKFQGRVTMTRNTSISTAYMELSSLRSEDTAVYYCAR |
| | | GPYYYYMDVWGKGTMVTVSS |
| 139102-aa | 89 | EIVMTQSPLSLPVTPGEPASISCRSSQSLLYSNGYNYVDWYLQKPGQSP |
| VL | | QLLIYLGSNRASGVPDRFSGSGSGTDFKLQISRVEAEDVGIYYCMQGRQ |
| | | FPYSFGQGTKVEIK |
| 139102-aa | 104 | MALPVTALLLPLALLLHAARPQVQLVQSGAEVKKPGASVKVSCKASGYT |
| Full CAR | | FSNYGITWVRQAPGQGLEWMGWISAYNGNTNYAQKFQGRVTMTRNTSIS |
| | | TAYMELSSLRSEDTAVYYCARGPYYYYMDVWGKGTMVTVSSASGGGGSG |
| | | GRASGGGGSEIVMTQSPLSLPVTPGEPASISCRSSQSLLYSNGYNYVDW |
| | | YLQKPGQSPQLLIYLGSNRASGVPDRFSGSGSGTDFKLQISRVEAEDVG |
| | | IYYCMQGRQFPYSFGQGTKVEIKTTTPAPRPPTPAPTIASQPLSLRPEA |
| | | CRPAAGGAVHTRGLDFACDIYIWAPLAGTCGVLLLSLVITLYCKRGRKK |
| | | LLYIFKQPFMRPVQTTQEEDGCSCRFPEEEEGGCELRVKFSRSADAPAY |
| | | KQGQNQLYNELNLGRREEYDVLDKRRGRDPEMGGKPRRKNPQEGLYNEL |
| | | QKDKMAEAYSEIGMKGERRRGKGHDGLYQGLSTATKDTYDALHMQALPP |
| | | R |
| 139102-nt | 119 | ATGGCCCTCCCTGTCACCGCCCTGCTGCTTCCGCTGGCTCTTCTGCTCC |
| Full CAR | | ACGCCGCTCGGCCCCAAGTCCAACTGGTCCAGAGCGGTGCAGAAGTGAA |
| | | GAAGCCCGGAGCGAGCGTGAAAGTGTCCTGCAAGGCTTCCGGGTACACC |
| | | TTCTCCAACTACGGCATCACTTGGGTGCGCCAGGCCCCGGGACAGGGCC |
| | | TGGAATGGATGGGGTGGATTTCCGCGTACAACGGCAATACGAACTACGC |
| | | TCAGAAGTTCCAGGGTAGAGTGACCATGACTAGGAACACCTCCATTTCC |
| | | ACCGCCTACATGGAACTGTCCTCCCTGCGGAGCGAGGACACCGCCGTGT |
| | | ACTATTGCGCCCGGGGACCATACTACTACTACATGGATGTCTGGGGGAA |
| | | GGGGACTATGGTCACCGTGTCATCCGCCTCGGGAGGCGGCGGATCAGGA |
| | | GGACGCGCCTCTGGTGGTGGAGGATCGGAGATCGTGATGACCCAGAGCC |
| | | CTCTCTCCTTGCCCGTGACTCCTGGGGAGCCCGCATCCATTTCATGCCG |
| | | GAGCTCCCAGTCACTTCTCTACTCCAACGGCTATAACTACGTGGATTGG |
| | | TACCTCCAAAAGCCGGGCCAGAGCCCGCAGCTGCTGATCTACCTGGGCT |
| | | CGAACAGGGCCAGCGGAGTGCCTGACCGGTTCTCCGGGTCGGGAAGCGG |
| | | GACCGACTTCAAGCTGCAAATCTCGAGAGTGGAGGCCGAGGACGTGGGA |
| | | ATCTACTACTGTATGCAGGGCCGCCAGTTTCCGTACTCGTTCGGACAGG |
| | | GCACCAAAGTGGAAATCAAGACCACTACCCCAGCACCGAGGCCACCCAC |
| | | CCCGGCTCCTACCATCGCCTCCCAGCCTCTGTCCCTGCGTCCGGAGGCA |
| | | TGTAGACCCGCAGCTGGTGGGGCCGTGCATACCCGGGGTCTTGACTTCG |
| | | CCTGCGATATCTACATTTGGGCCCCTCTGGCTGGTACTTGCGGGGTCCT |
| | | GCTGCTTTCACTCGTGATCACTCTTTACTGTAAGCGCGGTCGGAAGAAG |
| | | CTGCTGTACATCTTTAAGCAACCCTTCATGAGGCCTGTGCAGACTACTC |
| | | AAGAGGAGGACGGCTGTTCATGCCGGTTCCCAGAGGAGGAGGAAGGCGG |
| | | CTGCGAACTGCGCGTGAAATTCAGCCGCAGCGCAGATGCTCCAGCCTAC |
| | | AAGCAGGGGCAGAACCAGCTCTACAACGAACTCAATCTTGGTCGGAGAG |
| | | AGGAGTACGACGTGCTGGACAAGCGGAGAGGACGGGACCCAGAAATGGG |
| | | CGGGAAGCCGCGCAGAAAGAATCCCCAAGAGGGCCTGTACAACGAGCTC |
| | | CAAAAGGATAAGATGGCAGAAGCCTATAGCGAGATTGGTATGAAAGGGG |
| | | AACGCAGAAGAGGCAAAGGCCACGACGGACTGTACCAGGGACTCAGCAC |
| | | CGCCACCAAGGACACCTATGACGCTCTTCACATGCAGGCCCTGCCGCCT |
| | | CGG |

139104

| | | |
|---|---|---|
| 139104-aa | 45 | EVQLLETGGGLVQPGGSLRLSCAVSGFALSNHGMSWVRRAPGKGLEWVS |
| ScFv domain | | GIVYSGSTYYAASVKGRFTISRDNSRNTLYLQMNSLRPEDTAIYYCSAH |
| | | GGESDVWGQGTTVTVSSASGGGGSGGRASGGGGSEIVLTQSPATLSVSP |
| | | GESATLSCRASQSVSSNLAWYQQKPGQAPRLLIYGASTRASGIPDRFSG |
| | | SGSGTDFTLTISSLQAEDVAVYYCQQYGSSLTFGGGTKVEIK |
| 139104-nt | 60 | GAAGTGCAATTGCTCGAAACTGGAGGAGGTCTGGTGCAACCTGGAGGAT |
| ScFv domain | | CACTTCGCCTGTCCTGCGCCGTGTCGGGCTTTGCCCTGTCCAACCATGG |
| | | AATGAGCTGGGTCCGCCGCGCGCCGGGGAAGGGCCTCGAATGGGTGTCC |
| | | GGCATCGTCTACTCCGGCTCCACCTACTACGCCGCGTCCGTGAAGGGCC |
| | | GGTTCACGATTTCACGGGACAACTCGCGGAACACCCTGTACCTCCAAAT |
| | | GAATTCCCTTCGGCCGGAGGATACTGCCATCTACTACTGCTCCGCCCAC |
| | | GGTGGCGAATCCGACGTCTGGGGCCAGGGAACCACCGTGACCGTGTCCA |
| | | GCGCGTCCGGGGGAGGAGGAAGCGGGGGTAGAGCATCGGGTGGAGGCGG |
| | | ATCAGAGATCGTGCTGACCCAGTCCCCCGCCACCTTGAGCGTGTCACCA |
| | | GGAGAGTCCGCCACCCTGTCATGCCGCGCCAGCCAGTCCGTGTCCTCCA |
| | | ACCTGGCTTGGTACCAGCAGAAGCCGGGGCAGGCCCCTAGACTCCTGAT |
| | | CTATGGGGCGTCGACCCGGGCATCTGGAATTCCCGATAGGTTCAGCGGA |
| | | TCGGGCTCGGGCACTGACTTCACTCTGACCATCTCCTCGCTGCAAGCCG |
| | | AGGACGTGGCTGTGTACTACTGTCAGCAGTACGGAAGCTCCCTGACTTT |
| | | CGGTGGCGGGACCAAAGTCGAGATTAAG |
| 139104-aa | 75 | EVQLLETGGGLVQPGGSLRLSCAVSGFALSNHGMSWVRRAPGKGLEWVS |
| VH | | GIVYSGSTYYAASVKGRFTISRDNSRNTLYLQMNSLRPEDTAIYYCSAH |
| | | GGESDVWGQGTTVTVSS |
| 139104-aa | 90 | EIVLTQSPATLSVSPGESATLSCRASQSVSSNLAWYQQKPGQAPRLLIY |
| VL | | GASTRASGIPDRFSGSGSGTDFTLTISSLQAEDVAVYYCQQYGSSLTFG |
| | | GGTKVEIK |
| 139104-aa | 105 | MALPVTALLLPLALLLHAARPEVQLLETGGGLVQPGGSLRLSCAVSGFA |
| Full CAR | | LSNHGMSWVRRAPGKGLEWVSGIVYSGSTYYAASVKGRFTISRDNSRNT |
| | | LYLQMNSLRPEDTAIYYCSAHGGESDVWGQGTTVTVSSASGGGGSGGRA |
| | | SGGGGSEIVLTQSPATLSVSPGESATLSCRASQSVSSNLAWYQQKPGQA |
| | | PRLLIYGASTRASGIPDRFSGSGSGTDFTLTISSLQAEDVAVYYCQQYG |
| | | SSLTFGGGTKVEIKTTTPAPRPPTPAPTIASQPLSLRPEACRPAAGGAV |
| | | HTRGLDFACDIYIWAPLAGTCGVLLLSLVITLYCKRGRKKLLYIFKQPF |
| | | MRPVQTTQEEDGCSCRFPEEEEGGCELRVKFSRSADAPAYKQGQNQLYN |
| | | ELNLGRREEYDVLDKRRGRDPEMGGKPRRKNPQEGLYNELQKDKMAEAY |
| | | SEIGMKGERRRGKGHDGLYQGLSTATKDTYDALHMQALPPR |
| 139104-nt | 120 | ATGGCCCTCCCTGTCACCGCCCTGCTGCTTCCGCTGGCTCTTCTGCTCC |
| Full CAR | | ACGCCGCTCGGCCCGAAGTGCAATTGCTCGAAACTGGAGGAGGTCTGGT |
| | | GCAACCTGGAGGATCACTTCGCCTGTCCTGCGCCGTGTCGGGCTTTGCC |
| | | CTGTCCAACCATGGAATGAGCTGGGTCCGCCGCGCGCCGGGGAAGGGCC |
| | | TCGAATGGGTGTCCGGCATCGTCTACTCCGGCTCCACCTACTACGCCGC |
| | | GTCCGTGAAGGGCCGGTTCACGATTTCACGGGACAACTCGCGGAACACC |
| | | CTGTACCTCCAAATGAATTCCCTTCGGCCGGAGGATACTGCCATCTACT |
| | | ACTGCTCCGCCCACGGTGGCGAATCCGACGTCTGGGGCCAGGGAACCAC |
| | | CGTGACCGTGTCCAGCGCGTCCGGGGGAGGAGGAAGCGGGGGTAGAGCA |
| | | TCGGGTGGAGGCGGATCAGAGATCGTGCTGACCCAGTCCCCCGCCACCT |
| | | TGAGCGTGTCACCAGGAGAGTCCGCCACCCTGTCATGCCGCGCCAGCCA |
| | | GTCCGTGTCCTCCAACCTGGCTTGGTACCAGCAGAAGCCGGGGCAGGCC |
| | | CCTAGACTCCTGATCTATGGGGCGTCGACCCGGGCATCTGGAATTCCCG |
| | | ATAGGTTCAGCGGATCGGGCTCGGGCACTGACTTCACTCTGACCATCTC |
| | | CTCGCTGCAAGCCGAGGACGTGGCTGTGTACTACTGTCAGCAGTACGGA |
| | | AGCTCCCTGACTTTCGGTGGCGGGACCAAAGTCGAGATTAAGACCACTA |
| | | CCCCAGCACCGAGGCCACCCACCCCGGCTCCTACCATCGCCTCCCAGCC |
| | | TCTGTCCCTGCGTCCGGAGGCATGTAGACCCGCAGCTGGTGGGGCCGTG |
| | | CATACCCGGGGTCTTGACTTCGCCTGCGATATCTACATTTGGGCCCCTC |
| | | TGGCTGGTACTTGCGGGGTCCTGCTGCTTTCACTCGTGATCACTCTTTA |
| | | CTGTAAGCGCGGTCGGAAGAAGCTGCTGTACATCTTTAAGCAACCCTTC |
| | | ATGAGGCCTGTGCAGACTACTCAAGAGGAGGACGGCTGTTCATGCCGGT |
| | | TCCCAGAGGAGGAGGAAGGCGGCTGCGAACTGCGCGTGAAATTCAGCCG |
| | | CAGCGCAGATGCTCCAGCCTACAAGCAGGGGCAGAACCAGCTCTACAAC |
| | | GAACTCAATCTTGGTCGGAGAGAGGAGTACGACGTGCTGGACAAGCGGA |
| | | GAGGACGGGACCCAGAAATGGGCGGGAAGCCGCGCAGAAAGAATCCCCA |
| | | AGAGGGCCTGTACAACGAGCTCCAAAAGGATAAGATGGCAGAAGCCTAT |
| | | AGCGAGATTGGTATGAAAGGGGAACGCAGAAGAGGCAAAGGCCACGACG |
| | | GACTGTACCAGGGACTCAGCACCGCCACCAAGGACACCTATGACGCTCT |
| | | TCACATGCAGGCCCTGCCGCCTCGG |

139106

| | | |
|---|---|---|
| 139106-aa | 46 | EVQLVETGGGLVQPGGSLRLSCAVSGFALSNHGMSWVRRAPGKGLEWVS |
| ScFv domain | | GIVYSGSTYYAASVKGRFTISRDNSRNTLYLQMNSLRPEDTAIYYCSAH |
| | | GGESDVWGQGTTVTVSSASGGGGSGGRASGGGGSEIVMTQSPATLSVSP |
| | | GERATLSCRASQSVSSKLAWYQQKPGQAPRLLMYGASIRATGIPDRFSG |
| | | SGSGTEFTLTISSLEPEDFAVYYCQQYGSSSWTFGQGTKVEIK |
| 139106-nt | 61 | GAAGTGCAATTGGTGGAAACTGGAGGAGGACTTGTGCAACCTGGAGGAT |
| ScFv domain | | CATTGAGACTGAGCTGCGCAGTGTCGGGATTCGCCCTGAGCAACCATGG |
| | | AATGTCCTGGGTCAGAAGGGCCCCTGGAAAAGGCCTCGAATGGGTGTCA |
| | | GGGATCGTGTACTCCGGTTCCACTTACTACGCCGCCTCCGTGAAGGGGC |
| | | GCTTCACTATCTCACGGGATAACTCCCGCAATACCCTGTACCTCCAAAT |
| | | GAACAGCCTGCGGCCGGAGGATACCGCCATCTACTACTGTTCCGCCCAC |
| | | GGTGGAGAGTCTGACGTCTGGGGCCAGGGAACTACCGTGACCGTGTCCT |
| | | CCGCGTCCGGCGGTGGAGGGAGCGGCGGCCGCGCCAGCGGCGGCGGAGG |
| | | CTCCGAGATCGTGATGACCCAGAGCCCCGCTACTCTGTCGGTGTCGCCC |
| | | GGAGAAAGGGCGACCCTGTCCTGCCGGGCGTCGCAGTCCGTGAGCAGCA |
| | | AGCTGGCTTGGTACCAGCAGAAGCCGGGCCAGGCACCACGCCTGCTTAT |
| | | GTACGGTGCCTCCATTCGGGCCACCGGAATCCCGGACCGGTTCTCGGGG |
| | | TCGGGGTCCGGTACCGAGTTCACACTGACCATTTCCTCGCTCGAGCCCG |
| | | AGGACTTTGCCGTCTATTACTGCCAGCAGTACGGCTCCTCCTCATGGAC |
| | | GTTCGGCCAGGGGACCAAGGTCGAAATCAAG |
| 139106-aa | 76 | EVQLVETGGGLVQPGGSLRLSCAVSGFALSNHGMSWVRRAPGKGLEWVS |
| VH | | GIVYSGSTYYAASVKGRFTISRDNSRNTLYLQMNSLRPEDTAIYYCSAH |
| | | GGESDVWGQGTTVTVSS |
| 139106-aa | 91 | EIVMTQSPATLSVSPGERATLSCRASQSVSSKLAWYQQKPGQAPRLLMY |
| VL | | GASIRATGIPDRFSGSGSGTEFTLTISSLEPEDFAVYYCQQYGSSSWTF |
| | | GQGTKVEIK |
| 139106-aa | 106 | MALPVTALLLPLALLLHAARPEVQLVETGGGLVQPGGSLRLSCAVSGFA |
| Full CAR | | LSNHGMSWVRRAPGKGLEWVSGIVYSGSTYYAASVKGRFTISRDNSRNT |
| | | LYLQMNSLRPEDTAIYYCSAHGGESDVWGQGTTVTVSSASGGGGSGGRA |
| | | SGGGGSEIVMTQSPATLSVSPGERATLSCRASQSVSSKLAWYQQKPGQA |
| | | PRLLMYGASIRATGIPDRFSGSGSGTEFTLTISSLEPEDFAVYYCQQYG |
| | | SSSWTFGQGTKVEIKTTTPAPRPPTPAPTIASQPLSLRPEACRPAAGGA |
| | | VHTRGLDFACDIYIWAPLAGTCGVLLLSLVITLYCKRGRKKLLYIFKQP |
| | | FMRPVQTTQEEDGCSCRFPEEEEGGCELRVKFSRSADAPAYKQGQNQLY |
| | | NELNLGRREEYDVLDKRRGRDPEMGGKPRRKNPQEGLYNELQKDKMAEA |
| | | YSEIGMKGERRRGKGHDGLYQGLSTATKDTYDALHMQALPPR |
| 139106-nt | 121 | ATGGCCCTCCCTGTCACCGCCCTGCTGCTTCCGCTGGCTCTTCTGCTCC |
| Full CAR | | ACGCCGCTCGGCCCGAAGTGCAATTGGTGGAAACTGGAGGAGGACTTGT |
| | | GCAACCTGGAGGATCATTGAGACTGAGCTGCGCAGTGTCGGGATTCGCC |
| | | CTGAGCAACCATGGAATGTCCTGGGTCAGAAGGGCCCCTGGAAAAGGCC |
| | | TCGAATGGGTGTCAGGGATCGTGTACTCCGGTTCCACTTACTACGCCGC |
| | | CTCCGTGAAGGGGCGCTTCACTATCTCACGGGATAACTCCCGCAATACC |
| | | CTGTACCTCCAAATGAACAGCCTGCGGCCGGAGGATACCGCCATCTACT |
| | | ACTGTTCCGCCCACGGTGGAGAGTCTGACGTCTGGGGCCAGGGAACTAC |
| | | CGTGACCGTGTCCTCCGCGTCCGGCGGTGGAGGGAGCGGCGGCCGCGCC |
| | | AGCGGCGGCGGAGGCTCCGAGATCGTGATGACCCAGAGCCCCGCTACTC |
| | | TGTCGGTGTCGCCCGGAGAAAGGGCGACCCTGTCCTGCCGGGCGTCGCA |
| | | GTCCGTGAGCAGCAAGCTGGCTTGGTACCAGCAGAAGCCGGGCCAGGCA |
| | | CCACGCCTGCTTATGTACGGTGCCTCCATTCGGGCCACCGGAATCCCGG |
| | | ACCGGTTCTCGGGGTCGGGGTCCGGTACCGAGTTCACACTGACCATTTC |
| | | CTCGCTCGAGCCCGAGGACTTTGCCGTCTATTACTGCCAGCAGTACGGC |
| | | TCCTCCTCATGGACGTTCGGCCAGGGGACCAAGGTCGAAATCAAGACCA |
| | | CTACCCCAGCACCGAGGCCACCCACCCCGGCTCCTACCATCGCCTCCCA |
| | | GCCTCTGTCCCTGCGTCCGGAGGCATGTAGACCCGCAGCTGGTGGGGCC |
| | | GTGCATACCCGGGGTCTTGACTTCGCCTGCGATATCTACATTTGGGCCC |
| | | CTCTGGCTGGTACTTGCGGGGTCCTGCTGCTTTCACTCGTGATCACTCT |
| | | TTACTGTAAGCGCGGTCGGAAGAAGCTGCTGTACATCTTTAAGCAACCC |
| | | TTCATGAGGCCTGTGCAGACTACTCAAGAGGAGGACGGCTGTTCATGCC |
| | | GGTTCCCAGAGGAGGAGGAAGGCGGCTGCGAACTGCGCGTGAAATTCAG |
| | | CCGCAGCGCAGATGCTCCAGCCTACAAGCAGGGGCAGAACCAGCTCTAC |
| | | AACGAACTCAATCTTGGTCGGAGAGAGGAGTACGACGTGCTGGACAAGC |
| | | GGAGAGGACGGGACCCAGAAATGGGCGGGAAGCCGCGCAGAAAGAATCC |
| | | CCAAGAGGGCCTGTACAACGAGCTCCAAAAGGATAAGATGGCAGAAGCC |
| | | TATAGCGAGATTGGTATGAAAGGGGAACGCAGAAGAGGCAAAGGCCACG |
| | | ACGGACTGTACCAGGGACTCAGCACCGCCACCAAGGACACCTATGACGC |
| | | TCTTCACATGCAGGCCCTGCCGCCTCGG |

139107

| | | |
|---|---|---|
| 139107-aa | 47 | EVQLVETGGGVVQPGGSLRLSCAVSGFALSNHGMSWVRRAPGKGLEWVS |
| ScFv domain | | GIVYSGSTYYAASVKGRFTISRDNSRNTLYLQMNSLRPEDTAIYYCSAH |
| | | GGESDVWGQGTTVTVSSASGGGGSGGRASGGGGSEIVLTQSPGTLSLSP |
| | | GERATLSCRASQSVGSTNLAWYQQKPGQAPRLLIYDASNRATGIPDRFS |
| | | GGGSGTDFTLTISRLEPEDFAVYYCQQYGSSPPWTFGQGTKVEIK |
| 139107-nt | 62 | GAAGTGCAATTGGTGGAGACTGGAGGAGGAGTGGTGCAACCTGGAGGAA |
| ScFv domain | | GCCTGAGACTGTCATGCGCGGTGTCGGGCTTCGCCCTCTCCAACCACGG |
| | | AATGTCCTGGGTCCGCCGGGCCCCTGGGAAAGGACTTGAATGGGTGTCC |
| | | GGCATCGTGTACTCGGGTTCCACCTACTACGCGGCCTCAGTGAAGGGCC |
| | | GGTTTACTATTAGCCGCGACAACTCCAGAAACACACTGTACCTCCAAAT |
| | | GAACTCGCTGCGGCCGGAAGATACCGCTATCTACTACTGCTCCGCCCAT |
| | | GGGGGAGAGTCGGACGTCTGGGGACAGGGCACCACTGTCACTGTGTCCA |
| | | GCGCTTCCGGCGGTGGTGGAAGCGGGGGACGGGCCTCAGGAGGCGGTGG |
| | | CAGCGAGATTGTGCTGACCCAGTCCCCCGGGACCCTGAGCCTGTCCCCG |
| | | GGAGAAAGGGCCACCCTCTCCTGTCGGGCATCCCAGTCCGTGGGGTCTA |
| | | CTAACCTTGCATGGTACCAGCAGAAGCCCGGCCAGGCCCCTCGCCTGCT |
| | | GATCTACGACGCGTCCAATAGAGCCACCGGCATCCCGGATCGCTTCAGC |
| | | GGAGGCGGATCGGGCACCGACTTCACCCTCACCATTTCAAGGCTGGAAC |
| | | CGGAGGACTTCGCCGTGTACTACTGCCAGCAGTATGGTTCGTCCCCACC |
| | | CTGGACGTTCGGCCAGGGGACTAAGGTCGAGATCAAG |
| 139107-aa | 77 | EVQLVETGGGVVQPGGSLRLSCAVSGFALSNHGMSWVRRAPGKGLEWVS |
| VH | | GIVYSGSTYYAASVKGRFTISRDNSRNTLYLQMNSLRPEDTAIYYCSAH |
| | | GGESDVWGQGTTVTVSS |
| 139107-aa | 92 | EIVLTQSPGTLSLSPGERATLSCRASQSVGSTNLAWYQQKPGQAPRLLI |
| VL | | YDASNRATGIPDRFSGGGSGTDFTLTISRLEPEDFAVYYCQQYGSSPPW |
| | | TFGQGTKVEIK |
| 139107-aa | 107 | MALPVTALLLPLALLLHAARPEVQLVETGGGVVQPGGSLRLSCAVSGFA |
| Full CAR | | LSNHGMSWVRRAPGKGLEWVSGIVYSGSTYYAASVKGRFTISRDNSRNT |
| | | LYLQMNSLRPEDTAIYYCSAHGGESDVWGQGTTVTVSSASGGGGSGGRA |
| | | SGGGGSEIVLTQSPGTLSLSPGERATLSCRASQSVGSTNLAWYQQKPGQ |
| | | APRLLIYDASNRATGIPDRFSGGGSGTDFTLTISRLEPEDFAVYYCQQY |
| | | GSSPPWTFGQGTKVEIKTTTPAPRPPTPAPTIASQPLSLRPEACRPAAG |
| | | GAVHTRGLDFACDIYIWAPLAGTCGVLLLSLVITLYCKRGRKKLLYIFK |
| | | QPFMRPVQTTQEEDGCSCRFPEEEEGGCELRVKFSRSADAPAYKQGQNQ |
| | | LYNELNLGRREEYDVLDKRRGRDPEMGGKPRRKNPQEGLYNELQKDKMA |
| | | EAYSEIGMKGERRRGKGHDGLYQGLSTATKDTYDALHMQALPPR |
| 139107-nt | 122 | ATGGCCCTCCCTGTCACCGCCCTGCTGCTTCCGCTGGCTCTTCTGCTCC |
| Full CAR | | ACGCCGCTCGGCCCGAAGTGCAATTGGTGGAGACTGGAGGAGGAGTGGT |
| | | GCAACCTGGAGGAAGCCTGAGACTGTCATGCGCGGTGTCGGGCTTCGCC |
| | | CTCTCCAACCACGGAATGTCCTGGGTCCGCCGGGCCCCTGGGAAAGGAC |
| | | TTGAATGGGTGTCCGGCATCGTGTACTCGGGTTCCACCTACTACGCGGC |
| | | CTCAGTGAAGGGCCGGTTTACTATTAGCCGCGACAACTCCAGAAACACA |
| | | CTGTACCTCCAAATGAACTCGCTGCGGCCGGAAGATACCGCTATCTACT |
| | | ACTGCTCCGCCCATGGGGGAGAGTCGGACGTCTGGGGACAGGGCACCAC |
| | | TGTCACTGTGTCCAGCGCTTCCGGCGGTGGTGGAAGCGGGGGACGGGCC |
| | | TCAGGAGGCGGTGGCAGCGAGATTGTGCTGACCCAGTCCCCCGGGACCC |
| | | TGAGCCTGTCCCCGGGAGAAAGGGCCACCCTCTCCTGTCGGGCATCCCA |
| | | GTCCGTGGGGTCTACTAACCTTGCATGGTACCAGCAGAAGCCCGGCCAG |
| | | GCCCCTCGCCTGCTGATCTACGACGCGTCCAATAGAGCCACCGGCATCC |
| | | CGGATCGCTTCAGCGGAGGCGGATCGGGCACCGACTTCACCCTCACCAT |
| | | TTCAAGGCTGGAACCGGAGGACTTCGCCGTGTACTACTGCCAGCAGTAT |
| | | GGTTCGTCCCCACCCTGGACGTTCGGCCAGGGGACTAAGGTCGAGATCA |
| | | AGACCACTACCCCAGCACCGAGGCCACCCACCCCGGCTCCTACCATCGC |
| | | CTCCCAGCCTCTGTCCCTGCGTCCGGAGGCATGTAGACCCGCAGCTGGT |
| | | GGGGCCGTGCATACCCGGGGTCTTGACTTCGCCTGCGATATCTACATTT |
| | | GGGCCCCTCTGGCTGGTACTTGCGGGGTCCTGCTGCTTTCACTCGTGAT |
| | | CACTCTTTACTGTAAGCGCGGTCGGAAGAAGCTGCTGTACATCTTTAAG |
| | | CAACCCTTCATGAGGCCTGTGCAGACTACTCAAGAGGAGGACGGCTGTT |
| | | CATGCCGGTTCCCAGAGGAGGAGGAAGGCGGCTGCGAACTGCGCGTGAA |
| | | ATTCAGCCGCAGCGCAGATGCTCCAGCCTACAAGCAGGGGCAGAACCAG |
| | | CTCTACAACGAACTCAATCTTGGTCGGAGAGAGGAGTACGACGTGCTGG |
| | | ACAAGCGGAGAGGACGGGACCCAGAAATGGGCGGGAAGCCGCGCAGAAA |
| | | GAATCCCCAAGAGGGCCTGTACAACGAGCTCCAAAAGGATAAGATGGCA |
| | | GAAGCCTATAGCGAGATTGGTATGAAAGGGGAACGCAGAAGAGGCAAAG |
| | | GCCACGACGGACTGTACCAGGGACTCAGCACCGCCACCAAGGACACCTA |
| | | TGACGCTCTTCACATGCAGGCCCTGCCGCCTCGG |

139108

| | | |
|---|---|---|
| 139108-aa | 48 | QVQLVESGGGLVKPGGSLRLSCAASGFTFSDYYMSWIRQAPGKGLEWVS |
| ScFv domain | | YISSSGSTIYYADSVKGRFTISRDNAKNSLYLQMNSLRAEDTAVYYCAR |
| | | ESGDGMDVWGQGTTVTVSSASGGGGSGGRASGGGGSDIQMTQSPSSLSA |
| | | SVGDRVTITCRASQSISSYLNWYQQKPGKAPKLLIYAASSLQSGVPSRF |
| | | SGSGSGTDFTLTISSLQPEDFATYYCQQSYTLAFGQGTKVDIK |
| 139108-nt | 63 | CAAGTGCAACTCGTGGAATCTGGTGGAGGACTCGTGAAACCTGGAGGAT |
| ScFv domain | | CATTGAGACTGTCATGCGCGGCCTCGGGATTCACGTTCTCCGATTACTA |
| | | CATGAGCTGGATTCGCCAGGCTCCGGGGAAGGGACTGGAATGGGTGTCC |
| | | TACATTTCCTCATCCGGCTCCACCATCTACTACGCGGACTCCGTGAAGG |
| | | GGAGATTCACCATTAGCCGCGATAACGCCAAGAACAGCCTGTACCTTCA |
| | | GATGAACTCCCTGCGGGCTGAAGATACTGCCGTCTACTACTGCGCAAGG |
| | | GAGAGCGGAGATGGGATGGACGTCTGGGGACAGGGTACCACTGTGACCG |
| | | TGTCGTCGGCCTCCGGCGGAGGGGGTTCGGGTGGAAGGGCCAGCGGCGG |
| | | CGGAGGCAGCGACATCCAGATGACCCAGTCCCCCTCATCGCTGTCCGCC |
| | | TCCGTGGGCGACCGCGTCACCATCACATGCCGGGCCTCACAGTCGATCT |
| | | CCTCCTACCTCAATTGGTATCAGCAGAAGCCCGGAAAGGCCCCTAAGCT |
| | | TCTGATCTACGCAGCGTCCTCCCTGCAATCCGGGGTCCCATCTCGGTTC |
| | | TCCGGCTCGGGCAGCGGTACCGACTTCACTCTGACCATCTCGAGCCTGC |
| | | AGCCGGAGGACTTCGCCACTTACTACTGTCAGCAAAGCTACACCCTCGC |
| | | GTTTGGCCAGGGCACCAAAGTGGACATCAAG |
| 139108-aa | 78 | QVQLVESGGGLVKPGGSLRLSCAASGFTFSDYYMSWIRQAPGKGLEWVS |
| VH | | YISSSGSTIYYADSVKGRFTISRDNAKNSLYLQMNSLRAEDTAVYYCAR |
| | | ESGDGMDVWGQGTTVTVSS |
| 139108-aa | 93 | DIQMTQSPSSLSASVGDRVTITCRASQSISSYLNWYQQKPGKAPKLLIY |
| VL | | AASSLQSGVPSRFSGSGSGTDFTLTISSLQPEDFATYYCQQSYTLAFGQ |
| | | GTKVDIK |
| 139108-aa | 108 | MALPVTALLLPLALLLHAARPQVQLVESGGGLVKPGGSLRLSCAASGFT |
| Full CAR | | FSDYYMSWIRQAPGKGLEWVSYISSSGSTIYYADSVKGRFTISRDNAKN |
| | | SLYLQMNSLRAEDTAVYYCARESGDGMDVWGQGTTVTVSSASGGGGSGG |
| | | RASGGGGSDIQMTQSPSSLSASVGDRVTITCRASQSISSYLNWYQQKPG |
| | | KAPKLLIYAASSLQSGVPSRFSGSGSGTDFTLTISSLQPEDFATYYCQQ |
| | | SYTLAFGQGTKVDIKTTTPAPRPPTPAPTIASQPLSLRPEACRPAAGGA |
| | | VHTRGLDFACDIYIWAPLAGTCGVLLLSLVITLYCKRGRKKLLYIFKQP |
| | | FMRPVQTTQEEDGCSCRFPEEEEGGCELRVKFSRSADAPAYKQGQNQLY |
| | | NELNLGRREEYDVLDKRRGRDPEMGGKPRRKNPQEGLYNELQKDKMAEA |
| | | YSEIGMKGERRRGKGHDGLYQGLSTATKDTYDALHMQALPPR |
| 139108-nt | 123 | ATGGCCCTCCCTGTCACCGCCCTGCTGCTTCCGCTGGCTCTTCTGCTCC |
| Full CAR | | ACGCCGCTCGGCCCCAAGTGCAACTCGTGGAATCTGGTGGAGGACTCGT |
| | | GAAACCTGGAGGATCATTGAGACTGTCATGCGCGGCCTCGGGATTCACG |
| | | TTCTCCGATTACTACATGAGCTGGATTCGCCAGGCTCCGGGGAAGGGAC |
| | | TGGAATGGGTGTCCTACATTTCCTCATCCGGCTCCACCATCTACTACGC |
| | | GGACTCCGTGAAGGGGAGATTCACCATTAGCCGCGATAACGCCAAGAAC |
| | | AGCCTGTACCTTCAGATGAACTCCCTGCGGGCTGAAGATACTGCCGTCT |
| | | ACTACTGCGCAAGGGAGAGCGGAGATGGGATGGACGTCTGGGGACAGGG |
| | | TACCACTGTGACCGTGTCGTCGGCCTCCGGCGGAGGGGGTTCGGGTGGA |
| | | AGGGCCAGCGGCGGCGGAGGCAGCGACATCCAGATGACCCAGTCCCCCT |
| | | CATCGCTGTCCGCCTCCGTGGGCGACCGCGTCACCATCACATGCCGGGC |
| | | CTCACAGTCGATCTCCTCCTACCTCAATTGGTATCAGCAGAAGCCCGGA |
| | | AAGGCCCCTAAGCTTCTGATCTACGCAGCGTCCTCCCTGCAATCCGGGG |
| | | TCCCATCTCGGTTCTCCGGCTCGGGCAGCGGTACCGACTTCACTCTGAC |
| | | CATCTCGAGCCTGCAGCCGGAGGACTTCGCCACTTACTACTGTCAGCAA |
| | | AGCTACACCCTCGCGTTTGGCCAGGGCACCAAAGTGGACATCAAGACCA |
| | | CTACCCCAGCACCGAGGCCACCCACCCCGGCTCCTACCATCGCCTCCCA |
| | | GCCTCTGTCCCTGCGTCCGGAGGCATGTAGACCCGCAGCTGGTGGGGCC |
| | | GTGCATACCCGGGGTCTTGACTTCGCCTGCGATATCTACATTTGGGCCC |
| | | CTCTGGCTGGTACTTGCGGGGTCCTGCTGCTTTCACTCGTGATCACTCT |
| | | TTACTGTAAGCGCGGTCGGAAGAAGCTGCTGTACATCTTTAAGCAACCC |
| | | TTCATGAGGCCTGTGCAGACTACTCAAGAGGAGGACGGCTGTTCATGCC |
| | | GGTTCCCAGAGGAGGAGGAAGGCGGCTGCGAACTGCGCGTGAAATTCAG |
| | | CCGCAGCGCAGATGCTCCAGCCTACAAGCAGGGGCAGAACCAGCTCTAC |
| | | AACGAACTCAATCTTGGTCGGAGAGAGGAGTACGACGTGCTGGACAAGC |
| | | GGAGAGGACGGGACCCAGAAATGGGCGGGAAGCCGCGCAGAAAGAATCC |
| | | CCAAGAGGGCCTGTACAACGAGCTCCAAAAGGATAAGATGGCAGAAGCC |
| | | TATAGCGAGATTGGTATGAAAGGGGAACGCAGAAGAGGCAAAGGCCACG |
| | | ACGGACTGTACCAGGGACTCAGCACCGCCACCAAGGACACCTATGACGC |
| | | TCTTCACATGCAGGCCCTGCCGCCTCGG |

139110

| | | |
|---|---|---|
| 139110-aa | 50 | QVQLVQSGGGLVKPGGSLRLSCAASGFTFSDYYMSWIRQAPGKGLEWVS |
| ScFv domain | | YISSSGNTIYYADSVKGRFTISRDNAKNSLYLQMNSLRAEDTAVYYCAR |
| | | STMVREDYWGQGTLVTVSSASGGGGSGGRASGGGGSDIVLTQSPLSLPV |
| | | TLGQPASISCKSSESLVHNSGKTYLNWFHQRPGQSPRRLIYEVSNRDSG |
| | | VPDRFTGSGSGTDFTLKISRVEAEDVGVYYCMQGTHWPGTFGQGTKLEI |
| | | K |
| 139110-nt | 65 | CAAGTGCAACTGGTGCAAAGCGGAGGAGGATTGGTCAAACCCGGAGGAA |
| ScFv domain | | GCCTGAGACTGTCATGCGCGGCCTCTGGATTCACCTTCTCCGATTACTA |
| | | CATGTCATGGATCAGACAGGCCCCGGGGAAGGGCCTCGAATGGGTGTCC |
| | | TACATCTCGTCCTCCGGGAACACCATCTACTACGCCGACAGCGTGAAGG |
| | | GCCGCTTTACCATTTCCCGCGACAACGCAAAGAACTCGCTGTACCTTCA |
| | | GATGAATTCCCTGCGGGCTGAAGATACCGCGGTGTACTATTGCGCCCGG |
| | | TCCACTATGGTCCGGGAGGACTACTGGGGACAGGGCACACTCGTGACCG |
| | | TGTCCAGCGCGAGCGGGGGTGGAGGCAGCGGTGGACGCGCCTCCGGCGG |
| | | CGGCGGTTCAGACATCGTGCTGACTCAGTCGCCCCTGTCGCTGCCGGTC |
| | | ACCCTGGGCCAACCGGCCTCAATTAGCTGCAAGTCCTCGGAGAGCCTGG |
| | | TGCACAACTCAGGAAAGACTTACCTGAACTGGTTCCATCAGCGGCCTGG |
| | | ACAGTCCCCACGGAGGCTCATCTATGAAGTGTCCAACAGGGATTCGGGG |
| | | GTGCCCGACCGCTTCACTGGCTCCGGGTCCGGCACCGACTTCACCTTGA |
| | | AAATCTCCAGAGTGGAAGCCGAGGACGTGGGCGTGTACTACTGTATGCA |
| | | GGGTACCCACTGGCCTGGAACCTTTGGACAAGGAACTAAGCTCGAGATT |
| | | AAG |
| 139110-aa | 80 | QVQLVQSGGGLVKPGGSLRLSCAASGFTFSDYYMSWIRQAPGKGLEWVS |
| VH | | YISSSGNTIYYADSVKGRFTISRDNAKNSLYLQMNSLRAEDTAVYYCAR |
| | | STMVREDYWGQGTLVTVSS |
| 139110-aa | 95 | DIVLTQSPLSLPVTLGQPASISCKSSESLVHNSGKTYLNWFHQRPGQSP |
| VL | | RRLIYEVSNRDSGVPDRFTGSGSGTDFTLKISRVEAEDVGVYYCMQGTH |
| | | WPGTFGQGTKLEIK |
| 139110-aa | 110 | MALPVTALLLPLALLLHAARPQVQLVQSGGGLVKPGGSLRLSCAASGFT |
| Full CAR | | FSDYYMSWIRQAPGKGLEWVSYISSSGNTIYYADSVKGRFTISRDNAKN |
| | | SLYLQMNSLRAEDTAVYYCARSTMVREDYWGQGTLVTVSSASGGGGSGG |
| | | RASGGGGSDIVLTQSPLSLPVTLGQPASISCKSSESLVHNSGKTYLNWF |
| | | HQRPGQSPRRLIYEVSNRDSGVPDRFTGSGSGTDFTLKISRVEAEDVGV |
| | | YYCMQGTHWPGTFGQGTKLEIKTTTPAPRPPTPAPTIASQPLSLRPEAC |
| | | RPAAGGAVHTRGLDFACDIYIWAPLAGTCGVLLLSLVITLYCKRGRKKL |
| | | LYIFKQPFMRPVQTTQEEDGCSCRFPEEEEGGCELRVKFSRSADAPAYK |
| | | QGQNQLYNELNLGRREEYDVLDKRRGRDPEMGGKPRRKNPQEGLYNELQ |
| | | KDKMAEAYSEIGMKGERRRGKGHDGLYQGLSTATKDTYDALHMQALPPR |
| 139110-nt | 125 | ATGGCCCTCCCTGTCACCGCCCTGCTGCTTCCGCTGGCTCTTCTGCTCC |
| Full CAR | | ACGCCGCTCGGCCCCAAGTGCAACTGGTGCAAAGCGGAGGAGGATTGGT |
| | | CAAACCCGGAGGAAGCCTGAGACTGTCATGCGCGGCCTCTGGATTCACC |
| | | TTCTCCGATTACTACATGTCATGGATCAGACAGGCCCCGGGGAAGGGCC |
| | | TCGAATGGGTGTCCTACATCTCGTCCTCCGGGAACACCATCTACTACGC |
| | | CGACAGCGTGAAGGGCCGCTTTACCATTTCCCGCGACAACGCAAAGAAC |
| | | TCGCTGTACCTTCAGATGAATTCCCTGCGGGCTGAAGATACCGCGGTGT |
| | | ACTATTGCGCCCGGTCCACTATGGTCCGGGAGGACTACTGGGGACAGGG |
| | | CACACTCGTGACCGTGTCCAGCGCGAGCGGGGGTGGAGGCAGCGGTGGA |
| | | CGCGCCTCCGGCGGCGGCGGTTCAGACATCGTGCTGACTCAGTCGCCCC |
| | | TGTCGCTGCCGGTCACCCTGGGCCAACCGGCCTCAATTAGCTGCAAGTC |
| | | CTCGGAGAGCCTGGTGCACAACTCAGGAAAGACTTACCTGAACTGGTTC |
| | | CATCAGCGGCCTGGACAGTCCCCACGGAGGCTCATCTATGAAGTGTCCA |
| | | ACAGGGATTCGGGGGTGCCCGACCGCTTCACTGGCTCCGGGTCCGGCAC |
| | | CGACTTCACCTTGAAAATCTCCAGAGTGGAAGCCGAGGACGTGGGCGTG |
| | | TACTACTGTATGCAGGGTACCCACTGGCCTGGAACCTTTGGACAAGGAA |
| | | CTAAGCTCGAGATTAAGACCACTACCCCAGCACCGAGGCCACCCACCCC |
| | | GGCTCCTACCATCGCCTCCCAGCCTCTGTCCCTGCGTCCGGAGGCATGT |
| | | AGACCCGCAGCTGGTGGGGCCGTGCATACCCGGGGTCTTGACTTCGCCT |
| | | GCGATATCTACATTTGGGCCCCTCTGGCTGGTACTTGCGGGGTCCTGCT |
| | | GCTTTCACTCGTGATCACTCTTTACTGTAAGCGCGGTCGGAAGAAGCTG |
| | | CTGTACATCTTTAAGCAACCCTTCATGAGGCCTGTGCAGACTACTCAAG |
| | | AGGAGGACGGCTGTTCATGCCGGTTCCCAGAGGAGGAGGAAGGCGGCTG |
| | | CGAACTGCGCGTGAAATTCAGCCGCAGCGCAGATGCTCCAGCCTACAAG |
| | | CAGGGGCAGAACCAGCTCTACAACGAACTCAATCTTGGTCGGAGAGAGG |
| | | AGTACGACGTGCTGGACAAGCGGAGAGGACGGGACCCAGAAATGGGCGG |
| | | GAAGCCGCGCAGAAAGAATCCCCAAGAGGGCCTGTACAACGAGCTCCAA |
| | | AAGGATAAGATGGCAGAAGCCTATAGCGAGATTGGTATGAAAGGGGAAC |
| | | GCAGAAGAGGCAAAGGCCACGACGGACTGTACCAGGGACTCAGCACCGC |
| | | CACCAAGGACACCTATGACGCTCTTCACATGCAGGCCCTGCCGCCTCGG |

139112

| | | |
|---|---|---|
| 139112-aa | 51 | QVQLVESGGGLVQPGGSLRLSCAVSGFALSNHGMSWVRRAPGKGLEWVS |
| ScFv domain | | GIVYSGSTYYAASVKGRFTISRDNSRNTLYLQMNSLRPEDTAIYYCSAH |
| | | GGESDVWGQGTTVTVSSASGGGGSGGRASGGGGSDIRLTQSPSPLSASV |
| | | GDRVTITCQASEDINKFLNWYHQTPGKAPKLLIYDASTLQTGVPSRFSG |
| | | SGSGTDFTLTINSLQPEDIGTYYCQQYESLPLTFGGGTKVEIK |
| 139112-nt | 66 | CAAGTGCAACTCGTGGAATCTGGTGGAGGACTCGTGCAACCCGGTGGAA |
| ScFv domain | | GCCTTAGGCTGTCGTGCGCCGTCAGCGGGTTTGCTCTGAGCAACCATGG |
| | | AATGTCCTGGGTCCGCCGGGCACCGGGAAAAGGGCTGGAATGGGTGTCC |
| | | GGCATCGTGTACAGCGGGTCAACCTATTACGCCGCGTCCGTGAAGGGCA |
| | | GATTCACTATCTCAAGAGACAACAGCCGGAACACCCTGTACTTGCAAAT |
| | | GAATTCCCTGCGCCCCGAGGACACCGCCATCTACTACTGCTCCGCCCAC |
| | | GGAGGAGAGTCGGACGTGTGGGGCCAGGGAACGACTGTGACTGTGTCCA |
| | | GCGCATCAGGAGGGGGTGGTTCGGGCGGCCGGGCCTCGGGGGGAGGAGG |
| | | TTCCGACATTCGGCTGACCCAGTCCCCGTCCCCACTGTCGGCCTCCGTC |
| | | GGCGACCGCGTGACCATCACTTGTCAGGCGTCCGAGGACATTAACAAGT |
| | | TCCTGAACTGGTACCACCAGACCCCTGGAAAGGCCCCCAAGCTGCTGAT |
| | | CTACGATGCCTCGACCCTTCAAACTGGAGTGCCTAGCCGGTTCTCCGGG |
| | | TCCGGCTCCGGCACTGATTTCACTCTGACCATCAACTCATTGCAGCCGG |
| | | AAGATATCGGGACCTACTATTGCCAGCAGTACGAATCCCTCCCGCTCAC |
| | | ATTCGGCGGGGGAACCAAGGTCGAGATTAAG |
| 139112-aa | 81 | QVQLVESGGGLVQPGGSLRLSCAVSGFALSNHGMSWVRRAPGKGLEWVS |
| VH | | GIVYSGSTYYAASVKGRFTISRDNSRNTLYLQMNSLRPEDTAIYYCSAH |
| | | GGESDVWGQGTTVTVSS |
| 139112-aa | 96 | DIRLTQSPSPLSASVGDRVTITCQASEDINKFLNWYHQTPGKAPKLLIY |
| VL | | DASTLQTGVPSRFSGSGSGTDFTLTINSLQPEDIGTYYCQQYESLPLTF |
| | | GGGTKVEIK |
| 139112-aa | 111 | MALPVTALLLPLALLLHAARPQVQLVESGGGLVQPGGSLRLSCAVSGFA |
| Full CAR | | LSNHGMSWVRRAPGKGLEWVSGIVYSGSTYYAASVKGRFTISRDNSRNT |
| | | LYLQMNSLRPEDTAIYYCSAHGGESDVWGQGTTVTVSSASGGGGSGGRA |
| | | SGGGGSDIRLTQSPSPLSASVGDRVTITCQASEDINKFLNWYHQTPGKA |
| | | PKLLIYDASTLQTGVPSRFSGSGSGTDFTLTINSLQPEDIGTYYCQQYE |
| | | SLPLTFGGGTKVEIKTTTPAPRPPTPAPTIASQPLSLRPEACRPAAGGA |
| | | VHTRGLDFACDIYIWAPLAGTCGVLLLSLVITLYCKRGRKKLLYIFKQP |
| | | FMRPVQTTQEEDGCSCRFPEEEEGGCELRVKFSRSADAPAYKQGQNQLY |
| | | NELNLGRREEYDVLDKRRGRDPEMGGKPRRKNPQEGLYNELQKDKMAEA |
| | | YSEIGMKGERRRGKGHDGLYQGLSTATKDTYDALHMQALPPR |
| 139112-nt | 126 | ATGGCCCTCCCTGTCACCGCCCTGCTGCTTCCGCTGGCTCTTCTGCTCC |
| Full CAR | | ACGCCGCTCGGCCCCAAGTGCAACTCGTGGAATCTGGTGGAGGACTCGT |
| | | GCAACCCGGTGGAAGCCTTAGGCTGTCGTGCGCCGTCAGCGGGTTTGCT |
| | | CTGAGCAACCATGGAATGTCCTGGGTCCGCCGGGCACCGGGAAAAGGGC |
| | | TGGAATGGGTGTCCGGCATCGTGTACAGCGGGTCAACCTATTACGCCGC |
| | | GTCCGTGAAGGGCAGATTCACTATCTCAAGAGACAACAGCCGGAACACC |
| | | CTGTACTTGCAAATGAATTCCCTGCGCCCCGAGGACACCGCCATCTACT |
| | | ACTGCTCCGCCCACGGAGGAGAGTCGGACGTGTGGGGCCAGGGAACGAC |
| | | TGTGACTGTGTCCAGCGCATCAGGAGGGGGTGGTTCGGGCGGCCGGGCC |
| | | TCGGGGGGAGGAGGTTCCGACATTCGGCTGACCCAGTCCCCGTCCCCAC |
| | | TGTCGGCCTCCGTCGGCGACCGCGTGACCATCACTTGTCAGGCGTCCGA |
| | | GGACATTAACAAGTTCCTGAACTGGTACCACCAGACCCCTGGAAAGGCC |
| | | CCCAAGCTGCTGATCTACGATGCCTCGACCCTTCAAACTGGAGTGCCTA |
| | | GCCGGTTCTCCGGGTCCGGCTCCGGCACTGATTTCACTCTGACCATCAA |
| | | CTCATTGCAGCCGGAAGATATCGGGACCTACTATTGCCAGCAGTACGAA |
| | | TCCCTCCCGCTCACATTCGGCGGGGGAACCAAGGTCGAGATTAAGACCA |
| | | CTACCCCAGCACCGAGGCCACCCACCCCGGCTCCTACCATCGCCTCCCA |
| | | GCCTCTGTCCCTGCGTCCGGAGGCATGTAGACCCGCAGCTGGTGGGGCC |
| | | GTGCATACCCGGGGTCTTGACTTCGCCTGCGATATCTACATTTGGGCCC |
| | | CTCTGGCTGGTACTTGCGGGGTCCTGCTGCTTTCACTCGTGATCACTCT |
| | | TTACTGTAAGCGCGGTCGGAAGAAGCTGCTGTACATCTTTAAGCAACCC |
| | | TTCATGAGGCCTGTGCAGACTACTCAAGAGGAGGACGGCTGTTCATGCC |
| | | GGTTCCCAGAGGAGGAGGAAGGCGGCTGCGAACTGCGCGTGAAATTCAG |
| | | CCGCAGCGCAGATGCTCCAGCCTACAAGCAGGGGCAGAACCAGCTCTAC |
| | | AACGAACTCAATCTTGGTCGGAGAGAGGAGTACGACGTGCTGGACAAGC |
| | | GGAGAGGACGGGACCCAGAAATGGGCGGGAAGCCGCGCAGAAAGAATCC |
| | | CCAAGAGGGCCTGTACAACGAGCTCCAAAAGGATAAGATGGCAGAAGCC |
| | | TATAGCGAGATTGGTATGAAAGGGGAACGCAGAAGAGGCAAAGGCCACG |
| | | ACGGACTGTACCAGGGACTCAGCACCGCCACCAAGGACACCTATGACGC |
| | | TCTTCACATGCAGGCCCTGCCGCCTCGG |

139113

| | | |
|---|---|---|
| 139113-aa | 52 | EVQLVETGGGLVQPGGSLRLSCAVSGFALSNHGMSWVRRAPGKGLEWVS |
| ScFv domain | | GIVYSGSTYYAASVKGRFTISRDNSRNTLYLQMNSLRPEDTAIYYCSAH |
| | | GGESDVWGQGTTVTVSSASGGGGSGGRASGGGGSETTLTQSPATLSVSP |
| | | GERATLSCRASQSVGSNLAWYQQKPGQGPRLLIYGASTRATGIPARFSG |
| | | SGSGTEFTLTISSLQPEDFAVYYCQQYNDWLPVTFGQGTKVEIK |
| 139113-nt | 67 | GAAGTGCAATTGGTGGAAACTGGAGGAGGACTTGTGCAACCTGGAGGAT |
| ScFv domain | | CATTGCGGCTCTCATGCGCTGTCTCCGGCTTCGCCCTGTCAAATCACGG |
| | | GATGTCGTGGGTCAGACGGGCCCCGGGAAAGGGTCTGGAATGGGTGTCG |
| | | GGGATTGTGTACAGCGGCTCCACCTACTACGCCGCTTCGGTCAAGGGCC |
| | | GCTTCACTATTTCACGGGACAACAGCCGCAACACCCTCTATCTGCAAAT |
| | | GAACTCTCTCCGCCCGGAGGATACCGCCATCTACTACTGCTCCGCACAC |
| | | GGCGGCGAATCCGACGTGTGGGGACAGGGAACCACTGTCACCGTGTCGT |
| | | CCGCATCCGGTGGCGGAGGATCGGGTGGCCGGGCCTCCGGGGGCGGCGG |
| | | CAGCGAGACTACCCTGACCCAGTCCCCTGCCACTCTGTCCGTGAGCCCG |
| | | GGAGAGAGAGCCACCCTTAGCTGCCGGGCCAGCCAGAGCGTGGGCTCCA |
| | | ACCTGGCCTGGTACCAGCAGAAGCCAGGACAGGGTCCCAGGCTGCTGAT |
| | | CTACGGAGCCTCCACTCGCGCGACCGGCATCCCCGCGAGGTTCTCCGGG |
| | | TCGGGTTCCGGGACCGAGTTCACCCTGACCATCTCCTCCCTCCAACCGG |
| | | AGGACTTCGCGGTGTACTACTGTCAGCAGTACAACGATTGGCTGCCCGT |
| | | GACATTTGGACAGGGGACGAAGGTGGAAATCAAA |
| 139113-aa | 82 | EVQLVETGGGLVQPGGSLRLSCAVSGFALSNHGMSWVRRAPGKGLEWVS |
| VH | | GIVYSGSTYYAASVKGRFTISRDNSRNTLYLQMNSLRPEDTAIYYCSAH |
| | | GGESDVWGQGTTVTVSS |
| 139113-aa | 97 | ETTLTQSPATLSVSPGERATLSCRASQSVGSNLAWYQQKPGQGPRLLIY |
| VL | | GASTRATGIPARFSGSGSGTEFTLTISSLQPEDFAVYYCQQYNDWLPVT |
| | | FGQGTKVEIK |
| 139113-aa | 112 | MALPVTALLLPLALLLHAARPEVQLVETGGGLVQPGGSLRLSCAVSGFA |
| Full CAR | | LSNHGMSWVRRAPGKGLEWVSGIVYSGSTYYAASVKGRFTISRDNSRNT |
| | | LYLQMNSLRPEDTAIYYCSAHGGESDVWGQGTTVTVSSASGGGGSGGRA |
| | | SGGGGSETTLTQSPATLSVSPGERATLSCRASQSVGSNLAWYQQKPGQG |
| | | PRLLIYGASTRATGIPARFSGSGSGTEFTLTISSLQPEDFAVYYCQQYN |
| | | DWLPVTFGQGTKVEIKTTTPAPRPPTPAPTIASQPLSLRPEACRPAAGG |
| | | AVHTRGLDFACDIYIWAPLAGTCGVLLLSLVITLYCKRGRKKLLYIFKQ |
| | | PFMRPVQTTQEEDGCSCRFPEEEEGGCELRVKFSRSADAPAYKQGQNQL |
| | | YNELNLGRREEYDVLDKRRGRDPEMGGKPRRKNPQEGLYNELQKDKMAE |
| | | AYSEIGMKGERRRGKGHDGLYQGLSTATKDTYDALHMQALPPR |
| 139113-nt | 127 | ATGGCCCTCCCTGTCACCGCCCTGCTGCTTCCGCTGGCTCTTCTGCTCC |
| Full CAR | | ACGCCGCTCGGCCCGAAGTGCAATTGGTGGAAACTGGAGGAGGACTTGT |
| | | GCAACCTGGAGGATCATTGCGGCTCTCATGCGCTGTCTCCGGCTTCGCC |
| | | CTGTCAAATCACGGGATGTCGTGGGTCAGACGGGCCCCGGGAAAGGGTC |
| | | TGGAATGGGTGTCGGGGATTGTGTACAGCGGCTCCACCTACTACGCCGC |
| | | TTCGGTCAAGGGCCGCTTCACTATTTCACGGGACAACAGCCGCAACACC |
| | | CTCTATCTGCAAATGAACTCTCTCCGCCCGGAGGATACCGCCATCTACT |
| | | ACTGCTCCGCACACGGCGGCGAATCCGACGTGTGGGGACAGGGAACCAC |
| | | TGTCACCGTGTCGTCCGCATCCGGTGGCGGAGGATCGGGTGGCCGGGCC |
| | | TCCGGGGGCGGCGGCAGCGAGACTACCCTGACCCAGTCCCCTGCCACTC |
| | | TGTCCGTGAGCCCGGGAGAGAGAGCCACCCTTAGCTGCCGGGCCAGCCA |
| | | GAGCGTGGGCTCCAACCTGGCCTGGTACCAGCAGAAGCCAGGACAGGGT |
| | | CCCAGGCTGCTGATCTACGGAGCCTCCACTCGCGCGACCGGCATCCCCG |
| | | CGAGGTTCTCCGGGTCGGGTTCCGGGACCGAGTTCACCCTGACCATCTC |
| | | CTCCCTCCAACCGGAGGACTTCGCGGTGTACTACTGTCAGCAGTACAAC |
| | | GATTGGCTGCCCGTGACATTTGGACAGGGGACGAAGGTGGAAATCAAAA |
| | | CCACTACCCCAGCACCGAGGCCACCCACCCCGGCTCCTACCATCGCCTC |
| | | CCAGCCTCTGTCCCTGCGTCCGGAGGCATGTAGACCCGCAGCTGGTGGG |
| | | GCCGTGCATACCCGGGGTCTTGACTTCGCCTGCGATATCTACATTTGGG |
| | | CCCCTCTGGCTGGTACTTGCGGGGTCCTGCTGCTTTCACTCGTGATCAC |
| | | TCTTTACTGTAAGCGCGGTCGGAAGAAGCTGCTGTACATCTTTAAGCAA |
| | | CCCTTCATGAGGCCTGTGCAGACTACTCAAGAGGAGGACGGCTGTTCAT |
| | | GCCGGTTCCCAGAGGAGGAGGAAGGCGGCTGCGAACTGCGCGTGAAATT |
| | | CAGCCGCAGCGCAGATGCTCCAGCCTACAAGCAGGGGCAGAACCAGCTC |
| | | TACAACGAACTCAATCTTGGTCGGAGAGAGGAGTACGACGTGCTGGACA |
| | | AGCGGAGAGGACGGGACCCAGAAATGGGCGGGAAGCCGCGCAGAAAGAA |
| | | TCCCCAAGAGGGCCTGTACAACGAGCTCCAAAAGGATAAGATGGCAGAA |
| | | GCCTATAGCGAGATTGGTATGAAAGGGGAACGCAGAAGAGGCAAAGGCC |
| | | ACGACGGACTGTACCAGGGACTCAGCACCGCCACCAAGGACACCTATGA |
| | | CGCTCTTCACATGCAGGCCCTGCCGCCTCGG |

139114

| | | |
|---|---|---|
| 139114-aa | 53 | EVQLVESGGGLVQPGGSLRLSCAVSGFALSNHGMSWVRRAPGKGLEWVS |
| ScFv domain | | GIVYSGSTYYAASVKGRFTISRDNSRNTLYLQMNSLRPEDTAIYYCSAH |
| | | GGESDVWGQGTTVTVSSASGGGGSGGRASGGGGSEIVLTQSPGTLSLSP |
| | | GERATLSCRASQSIGSSSLAWYQQKPGQAPRLLMYGASSRASGIPDRFS |
| | | GSGSGTDFTLTISRLEPEDFAVYYCQQYAGSPPFTFGQGTKVEIK |
| 139114-nt | 68 | GAAGTGCAATTGGTGGAATCTGGTGGAGGACTTGTGCAACCTGGAGGAT |
| ScFv domain | | CACTGAGACTGTCATGCGCGGTGTCCGGTTTTGCCCTGAGCAATCATGG |
| | | GATGTCGTGGGTCCGGCGCGCCCCCGGAAAGGGTCTGGAATGGGTGTCG |
| | | GGTATCGTCTACTCCGGGAGCACTTACTACGCCGCGAGCGTGAAGGGCC |
| | | GCTTCACCATTTCCCGCGATAACTCCCGCAACACCCTGTACTTGCAAAT |
| | | GAACTCGCTCCGGCCTGAGGACACTGCCATCTACTACTGCTCCGCACAC |
| | | GGAGGAGAATCCGACGTGTGGGGCCAGGGAACTACCGTGACCGTCAGCA |
| | | GCGCCTCCGGCGGCGGGGGCTCAGGCGGACGGGCTAGCGGCGGCGGTGG |
| | | CTCCGAGATCGTGCTGACCCAGTCGCCTGGCACTCTCTCGCTGAGCCCC |
| | | GGGGAAAGGGCAACCCTGTCCTGTCGGGCCAGCCAGTCCATTGGATCAT |
| | | CCTCCCTCGCCTGGTATCAGCAGAAACCGGGACAGGCTCCGCGGCTGCT |
| | | TATGTATGGGGCCAGCTCAAGAGCCTCCGGCATTCCCGACCGGTTCTCC |
| | | GGGTCCGGTTCCGGCACCGATTTCACCCTGACTATCTCGAGGCTGGAGC |
| | | CAGAGGACTTCGCCGTGTACTACTGCCAGCAGTACGCGGGGTCCCCGCC |
| | | GTTCACGTTCGGACAGGGAACCAAGGTCGAGATCAAG |
| 139114-aa | 83 | EVQLVESGGGLVQPGGSLRLSCAVSGFALSNHGMSWVRRAPGKGLEWVS |
| VH | | GIVYSGSTYYAASVKGRFTISRDNSRNTLYLQMNSLRPEDTAIYYCSAH |
| | | GGESDVWGQGTTVTVSS |
| 139114-aa | 98 | EIVLTQSPGTLSLSPGERATLSCRASQSIGSSSLAWYQQKPGQAPRLLM |
| VL | | YGASSRASGIPDRFSGSGSGTDFTLTISRLEPEDFAVYYCQQYAGSPPF |
| | | TFGQGTKVEIK |
| 139114-aa | 113 | MALPVTALLLPLALLLHAARPEVQLVESGGGLVQPGGSLRLSCAVSGFA |
| Full CAR | | LSNHGMSWVRRAPGKGLEWVSGIVYSGSTYYAASVKGRFTISRDNSRNT |
| | | LYLQMNSLRPEDTAIYYCSAHGGESDVWGQGTTVTVSSASGGGGSGGRA |
| | | SGGGGSEIVLTQSPGTLSLSPGERATLSCRASQSIGSSSLAWYQQKPGQ |
| | | APRLLMYGASSRASGIPDRFSGSGSGTDFTLTISRLEPEDFAVYYCQQY |
| | | AGSPPFTFGQGTKVEIKTTTPAPRPPTPAPTIASQPLSLRPEACRPAAG |
| | | GAVHTRGLDFACDIYIWAPLAGTCGVLLLSLVITLYCKRGRKKLLYIFK |
| | | QPFMRPVQTTQEEDGCSCRFPEEEEGGCELRVKFSRSADAPAYKQGQNQ |
| | | LYNELNLGRREEYDVLDKRRGRDPEMGGKPRRKNPQEGLYNELQKDKMA |
| | | EAYSEIGMKGERRRGKGHDGLYQGLSTATKDTYDALHMQALPPR |
| 139114-nt | 128 | ATGGCCCTCCCTGTCACCGCCCTGCTGCTTCCGCTGGCTCTTCTGCTCC |
| Full CAR | | ACGCCGCTCGGCCCGAAGTGCAATTGGTGGAATCTGGTGGAGGACTTGT |
| | | GCAACCTGGAGGATCACTGAGACTGTCATGCGCGGTGTCCGGTTTTGCC |
| | | CTGAGCAATCATGGGATGTCGTGGGTCCGGCGCGCCCCCGGAAAGGGTC |
| | | TGGAATGGGTGTCGGGTATCGTCTACTCCGGGAGCACTTACTACGCCGC |
| | | GAGCGTGAAGGGCCGCTTCACCATTTCCCGCGATAACTCCCGCAACACC |
| | | CTGTACTTGCAAATGAACTCGCTCCGGCCTGAGGACACTGCCATCTACT |
| | | ACTGCTCCGCACACGGAGGAGAATCCGACGTGTGGGGCCAGGGAACTAC |
| | | CGTGACCGTCAGCAGCGCCTCCGGCGGCGGGGGCTCAGGCGGACGGGCT |
| | | AGCGGCGGCGGTGGCTCCGAGATCGTGCTGACCCAGTCGCCTGGCACTC |
| | | TCTCGCTGAGCCCCGGGGAAAGGGCAACCCTGTCCTGTCGGGCCAGCCA |
| | | GTCCATTGGATCATCCTCCCTCGCCTGGTATCAGCAGAAACCGGGACAG |
| | | GCTCCGCGGCTGCTTATGTATGGGGCCAGCTCAAGAGCCTCCGGCATTC |
| | | CCGACCGGTTCTCCGGGTCCGGTTCCGGCACCGATTTCACCCTGACTAT |
| | | CTCGAGGCTGGAGCCAGAGGACTTCGCCGTGTACTACTGCCAGCAGTAC |
| | | GCGGGGTCCCCGCCGTTCACGTTCGGACAGGGAACCAAGGTCGAGATCA |
| | | AGACCACTACCCCAGCACCGAGGCCACCCACCCCGGCTCCTACCATCGC |
| | | CTCCCAGCCTCTGTCCCTGCGTCCGGAGGCATGTAGACCCGCAGCTGGT |
| | | GGGGCCGTGCATACCCGGGGTCTTGACTTCGCCTGCGATATCTACATTT |
| | | GGGCCCCTCTGGCTGGTACTTGCGGGGTCCTGCTGCTTTCACTCGTGAT |
| | | CACTCTTTACTGTAAGCGCGGTCGGAAGAAGCTGCTGTACATCTTTAAG |
| | | CAACCCTTCATGAGGCCTGTGCAGACTACTCAAGAGGAGGACGGCTGTT |
| | | CATGCCGGTTCCCAGAGGAGGAGGAAGGCGGCTGCGAACTGCGCGTGAA |
| | | ATTCAGCCGCAGCGCAGATGCTCCAGCCTACAAGCAGGGGCAGAACCAG |
| | | CTCTACAACGAACTCAATCTTGGTCGGAGAGAGGAGTACGACGTGCTGG |
| | | ACAAGCGGAGAGGACGGGACCCAGAAATGGGCGGGAAGCCGCGCAGAAA |
| | | GAATCCCCAAGAGGGCCTGTACAACGAGCTCCAAAAGGATAAGATGGCA |
| | | GAAGCCTATAGCGAGATTGGTATGAAAGGGGAACGCAGAAGAGGCAAAG |
| | | GCCACGACGGACTGTACCAGGGACTCAGCACCGCCACCAAGGACACCTA |
| | | TGACGCTCTTCACATGCAGGCCCTGCCGCCTCGG |

149362

| | | |
|---|---|---|
| 149362-aa | 129 | QVQLQESGPGLVKPSETLSLTCTVSGGSISSSYYYWGWIRQPPGKGLEW |
| ScFv domain | | IGSIYYSGSAYYNPSLKSRVTISVDTSKNQFSLRLSSVTAADTAVYYCA |
| | | RHWQEWPDAFDIWGQGTMVTVSSGGGGSGGGGSGGGGSETTLTQSPAFM |
| | | SATPGDKVIISCKASQDIDDAMNWYQQKPGEAPLFIIQSATSPVPGIPP |
| | | RFSGSGFGTDFSLTINNIESEDAAYYFCLQHDNFPLTFGQGTKLEIK |
| 149362-nt | 150 | CAAGTGCAGCTTCAGGAAAGCGGACCGGGCCTGGTCAAGCCATCCGAAA |
| ScFv domain | | CTCTCTCCCTGACTTGCACTGTGTCTGGCGGTTCCATCTCATCGTCGTA |
| | | CTACTACTGGGGCTGGATTAGGCAGCCGCCCGGAAAGGGACTGGAGTGG |
| | | ATCGGAAGCATCTACTATTCCGGCTCGGCGTACTACAACCCTAGCCTCA |
| | | AGTCGAGAGTGACCATCTCCGTGGATACCTCCAAGAACCAGTTTTCCCT |
| | | GCGCCTGAGCTCCGTGACCGCCGCTGACACCGCCGTGTACTACTGTGCT |
| | | CGGCATTGGCAGGAATGGCCCGATGCCTTCGACATTTGGGGCCAGGGCA |
| | | CTATGGTCACTGTGTCATCCGGGGGTGGAGGCAGCGGGGGAGGAGGGTC |
| | | CGGGGGGGGAGGTTCAGAGACAACCTTGACCCAGTCACCCGCATTCATG |
| | | TCCGCCACTCCGGGAGACAAGGTCATCATCTCGTGCAAAGCGTCCCAGG |
| | | ATATCGACGATGCCATGAATTGGTACCAGCAGAAGCCTGGCGAAGCGCC |
| | | GCTGTTCATTATCCAATCCGCAACCTCGCCCGTGCCTGGAATCCCACCG |
| | | CGGTTCAGCGGCAGCGGTTTCGGAACCGACTTTTCCCTGACCATTAACA |
| | | ACATTGAGTCCGAGGACGCCGCCTACTACTTCTGCCTGCAACACGACAA |
| | | CTTCCCTCTCACGTTCGGCCAGGGAACCAAGCTGGAAATCAAG |
| 149362-aa | 171 | QVQLQESGPGLVKPSETLSLTCTVSGGSISSSYYYWGWIRQPPGKGLEW |
| VH | | IGSIYYSGSAYYNPSLKSRVTISVDTSKNQFSLRLSSVTAADTAVYYCA |
| | | RHWQEWPDAFDIWGQGTMVTVSS |
| 149362-aa VL | 192 | ETTLTQSPAFMSATPGDKVIISCKASQDIDDAMNWYQQKPGEAPLFIIQ |
| | | SATSPVPGIPPRFSGSGFGTDFSLTINNIESEDAAYYFCLQHDNFPLTF |
| | | GQGTKLEIK |
| 149362-aa | 213 | MALPVTALLLPLALLLHAARPQVQLQESGPGLVKPSETLSLTCTVSGGS |
| Full CAR | | ISSSYYYWGWIRQPPGKGLEWIGSIYYSGSAYYNPSLKSRVTISVDTSK |
| | | NQFSLRLSSVTAADTAVYYCARHWQEWPDAFDIWGQGTMVTVSSGGGGS |
| | | GGGGSGGGGSETTLTQSPAFMSATPGDKVIISCKASQDIDDAMNWYQQK |
| | | PGEAPLFIIQSATSPVPGIPPRFSGSGFGTDFSLTINNIESEDAAYYFC |
| | | LQHDNFPLTFGQGTKLEIKTTTPAPRPPTPAPTIASQPLSLRPEACRPA |
| | | AGGAVHTRGLDFACDIYIWAPLAGTCGVLLLSLVITLYCKRGRKKLLYI |
| | | FKQPFMRPVQTTQEEDGCSCRFPEEEEGGCELRVKFSRSADAPAYKQGQ |
| | | NQLYNELNLGRREEYDVLDKRRGRDPEMGGKPRRKNPQEGLYNELQKDK |
| | | [sequence omitted] |
| 149362-nt | 234 | ATGGCCCTCCCTGTCACCGCCCTGCTGCTTCCGCTGGCTCTTCTGCTCC |
| Full CAR | | ACGCCGCTCGGCCCCAAGTGCAGCTTCAGGAAAGCGGACCGGGCCTGGT |
| | | CAAGCCATCCGAAACTCTCTCCCTGACTTGCACTGTGTCTGGCGGTTCC |
| | | ATCTCATCGTCGTACTACTACTGGGGCTGGATTAGGCAGCCGCCCGGAA |
| | | AGGGACTGGAGTGGATCGGAAGCATCTACTATTCCGGCTCGGCGTACTA |
| | | CAACCCTAGCCTCAAGTCGAGAGTGACCATCTCCGTGGATACCTCCAAG |
| | | AACCAGTTTTCCCTGCGCCTGAGCTCCGTGACCGCCGCTGACACCGCCG |
| | | TGTACTACTGTGCTCGGCATTGGCAGGAATGGCCCGATGCCTTCGACAT |
| | | TTGGGGCCAGGGCACTATGGTCACTGTGTCATCCGGGGGTGGAGGCAGC |
| | | GGGGGAGGAGGGTCCGGGGGGGGAGGTTCAGAGACAACCTTGACCCAGT |
| | | CACCCGCATTCATGTCCGCCACTCCGGGAGACAAGGTCATCATCTCGTG |
| | | CAAAGCGTCCCAGGATATCGACGATGCCATGAATTGGTACCAGCAGAAG |
| | | CCTGGCGAAGCGCCGCTGTTCATTATCCAATCCGCAACCTCGCCCGTGC |
| | | CTGGAATCCCACCGCGGTTCAGCGGCAGCGGTTTCGGAACCGACTTTTC |
| | | CCTGACCATTAACAACATTGAGTCCGAGGACGCCGCCTACTACTTCTGC |
| | | CTGCAACACGACAACTTCCCTCTCACGTTCGGCCAGGGAACCAAGCTGG |
| | | AAATCAAGACCACTACCCCAGCACCGAGGCCACCCACCCCGGCTCCTAC |
| | | CATCGCCTCCCAGCCTCTGTCCCTGCGTCCGGAGGCATGTAGACCCGCA |
| | | GCTGGTGGGGCCGTGCATACCCGGGGTCTTGACTTCGCCTGCGATATCT |
| | | ACATTTGGGCCCCTCTGGCTGGTACTTGCGGGGTCCTGCTGCTTTCACT |
| | | CGTGATCACTCTTTACTGTAAGCGCGGTCGGAAGAAGCTGCTGTACATC |
| | | TTTAAGCAACCCTTCATGAGGCCTGTGCAGACTACTCAAGAGGAGGACG |
| | | GCTGTTCATGCCGGTTCCCAGAGGAGGAGGAAGGCGGCTGCGAACTGCG |
| | | CGTGAAATTCAGCCGCAGCGCAGATGCTCCAGCCTACAAGCAGGGGCAG |
| | | AACCAGCTCTACAACGAACTCAATCTTGGTCGGAGAGAGGAGTACGACG |
| | | TGCTGGACAAGCGGAGAGGACGGGACCCAGAAATGGGCGGGAAGCCGCG |
| | | CAGAAAGAATCCCCAAGAGGGCCTGTACAACGAGCTCCAAAAGGATAAG |
| | | ATGGCAGAAGCCTATAGCGAGATTGGTATGAAAGGGGAACGCAGAAGAG |
| | | GCAAAGGCCACGACGGACTGTACCAGGGACTCAGCACCGCCACCAAGGA |
| | | CACCTATGACGCTCTTCACATGCAGGCCCTGCCGCCTCGG |

149363

| | | |
|---|---|---|
| 149363-aa | 130 | VNLRESGPALVKPTQTLTLTCTFSGFSLRTSGMCVSWIRQPPGKALEWL |
| ScFv domain | | ARIDWDEDKFYSTSLKTRLTISKDTSDNQVVLRMTNMDPADTATYYCAR |
| | | SGAGGTSATAFDIWGPGTMVTVSSGGGGSGGGGSGGGGSDIQMTQSPSS |
| | | LSASVGDRVTITCRASQDIYNNLAWFQLKPGSAPRSLMYAANKSQSGVP |
| | | SRFSGSASGTDFTLTISSLQPEDFATYYCQHYYRFPYSFGQGTKLEIK |
| 149363-nt | 151 | CAAGTCAATCTGCGCGAATCCGGCCCCGCCTTGGTCAAGCCTACCCAGA |
| ScFv domain | | CCCTCACTCTGACCTGTACTTTCTCCGGCTTCTCCCTGCGGACTTCCGG |
| | | GATGTGCGTGTCCTGGATCAGACAGCCTCCGGGAAAGGCCCTGGAGTGG |
| | | CTCGCTCGCATTGACTGGGATGAGGACAAGTTCTACTCCACCTCACTCA |
| | | AGACCAGGCTGACCATCAGCAAAGATACCTCTGACAACCAAGTGGTGCT |
| | | CCGCATGACCAACATGGACCCAGCCGACACTGCCACTTACTACTGCGCG |
| | | AGGAGCGGAGCGGGCGGAACCTCCGCCACCGCCTTCGATATTTGGGGCC |
| | | CGGGTACCATGGTCACCGTGTCAAGCGGAGGAGGGGGGTCCGGGGGCGG |
| | | CGGTTCCGGGGGAGGCGGATCGGACATTCAGATGACTCAGTCACCATCG |
| | | TCCCTGAGCGCTAGCGTGGGCGACAGAGTGACAATCACTTGCCGGGCAT |
| | | CCCAGGACATCTATAACAACCTTGCGTGGTTCCAGCTGAAGCCTGGTTC |
| | | CGCACCGCGGTCACTTATGTACGCCGCCAACAAGAGCCAGTCGGGAGTG |
| | | CCGTCCCGGTTTTCCGGTTCGGCCTCGGGAACTGACTTCACCCTGACGA |
| | | TCTCCAGCCTGCAACCCGAGGATTTCGCCACCTACTACTGCCAGCACTA |
| | | CTACCGCTTTCCCTACTCGTTCGGACAGGGAACCAAGCTGGAAATCAAG |
| 149363-aa | 172 | QVNLRESGPALVKPTQTLTLTCTFSGFSLRTSGMCVSWIRQPPGKALEW |
| VH | | LARIDWDEDKFYSTSLKTRLTISKDTSDNQVVLRMTNMDPADTATYYCA |
| | | RSGAGGTSATAFDIWGPGTMVTVSS |
| 149363-aa VL | 193 | DIQMTQSPSSLSASVGDRVTITCRASQDIYNNLAWFQLKPGSAPRSLMY |
| | | AANKSQSGVPSRFSGSASGTDFTLTISSLQPEDFATYYCQHYYRFPYSF |
| | | GQGTKLEIK |
| 149363-aa | 214 | MALPVTALLLPLALLLHAARPQVNLRESGPALVKPTQTLTLTCTFSGFS |
| Full CAR | | LRTSGMCVSWIRQPPGKALEWLARIDWDEDKFYSTSLKTRLTISKDTSD |
| | | NQVVLRMTNMDPADTATYYCARSGAGGTSATAFDIWGPGTMVTVSSGGG |
| | | GSGGGGSGGGGSDIQMTQSPSSLSASVGDRVTITCRASQDIYNNLAWFQ |
| | | LKPGSAPRSLMYAANKSQSGVPSRFSGSASGTDFTLTISSLQPEDFATY |
| | | YCQHYYRFPYSFGQGTKLEIKTTTPAPRPPTPAPTIASQPLSLRPEACR |
| | | PAAGGAVHTRGLDFACDIYIWAPLAGTCGVLLLSLVITLYCKRGRKKLL |
| | | YIFKQPFMRPVQTTQEEDGCSCRFPEEEEGGCELRVKFSRSADAPAYKQ |
| | | GQNQLYNELNLGRREEYDVLDKRRGRDPEMGGKPRRKNPQEGLYNELQK |
| | | DKMAEAYSEIGMKGERRRGKGHDGLYQGLSTATKDTYDALHMQALPPR |
| 149363-nt | 235 | ATGGCCCTCCCTGTCACCGCCCTGCTGCTTCCGCTGGCTCTTCTGCTCC |
| Full CAR | | ACGCCGCTCGGCCCCAAGTCAATCTGCGCGAATCCGGCCCCGCCTTGGT |
| | | CAAGCCTACCCAGACCCTCACTCTGACCTGTACTTTCTCCGGCTTCTCC |
| | | CTGCGGACTTCCGGGATGTGCGTGTCCTGGATCAGACAGCCTCCGGGAA |
| | | AGGCCCTGGAGTGGCTCGCTCGCATTGACTGGGATGAGGACAAGTTCTA |
| | | CTCCACCTCACTCAAGACCAGGCTGACCATCAGCAAAGATACCTCTGAC |
| | | AACCAAGTGGTGCTCCGCATGACCAACATGGACCCAGCCGACACTGCCA |
| | | CTTACTACTGCGCGAGGAGCGGAGCGGGCGGAACCTCCGCCACCGCCTT |
| | | CGATATTTGGGGCCCGGGTACCATGGTCACCGTGTCAAGCGGAGGAGGG |
| | | GGGTCCGGGGGCGGCGGTTCCGGGGGAGGCGGATCGGACATTCAGATGA |
| | | CTCAGTCACCATCGTCCCTGAGCGCTAGCGTGGGCGACAGAGTGACAAT |
| | | CACTTGCCGGGCATCCCAGGACATCTATAACAACCTTGCGTGGTTCCAG |
| | | CTGAAGCCTGGTTCCGCACCGCGGTCACTTATGTACGCCGCCAACAAGA |
| | | GCCAGTCGGGAGTGCCGTCCCGGTTTTCCGGTTCGGCCTCGGGAACTGA |
| | | CTTCACCCTGACGATCTCCAGCCTGCAACCCGAGGATTTCGCCACCTAC |
| | | TACTGCCAGCACTACTACCGCTTTCCCTACTCGTTCGGACAGGGAACCA |
| | | AGCTGGAAATCAAGACCACTACCCCAGCACCGAGGCCACCCACCCCGGC |
| | | TCCTACCATCGCCTCCCAGCCTCTGTCCCTGCGTCCGGAGGCATGTAGA |
| | | CCCGCAGCTGGTGGGGCCGTGCATACCCGGGGTCTTGACTTCGCCTGCG |
| | | ATATCTACATTTGGGCCCCTCTGGCTGGTACTTGCGGGGTCCTGCTGCT |
| | | TTCACTCGTGATCACTCTTTACTGTAAGCGCGGTCGGAAGAAGCTGCTG |
| | | TACATCTTTAAGCAACCCTTCATGAGGCCTGTGCAGACTACTCAAGAGG |
| | | AGGACGGCTGTTCATGCCGGTTCCCAGAGGAGGAGGAAGGCGGCTGCGA |
| | | ACTGCGCGTGAAATTCAGCCGCAGCGCAGATGCTCCAGCCTACAAGCAG |
| | | GGGCAGAACCAGCTCTACAACGAACTCAATCTTGGTCGGAGAGAGGAGT |
| | | ACGACGTGCTGGACAAGCGGAGAGGACGGGACCCAGAAATGGGCGGGAA |
| | | GCCGCGCAGAAAGAATCCCCAAGAGGGCCTGTACAACGAGCTCCAAAAG |
| | | GATAAGATGGCAGAAGCCTATAGCGAGATTGGTATGAAAGGGGAACGCA |
| | | GAAGAGGCAAAGGCCACGACGGACTGTACCAGGGACTCAGCACCGCCAC |
| | | CAAGGACACCTATGACGCTCTTCACATGCAGGCCCTGCCGCCTCGG |

149364

| | | |
|---|---|---|
| 149364-aa | 131 | EVQLVESGGGLVKPGGSLRLSCAASGFTFSSYSMNWVRQAPGKGLEWVS |
| ScFv domain | | sissSSSYIYYADSVKGRFTISRDNAKNSLYLQMNSLRAEDTAVYYCAK |
| | | TIAAVYAFDIWGQGTTVTVSSGGGGSGGGGSGGGGSEIVLTQSPLSLPV |
| | | TPEEPASISCRSSQSLLHSNGYNYLDWYLQKPGQSPQLLIYLGSNRASG |
| | | VPDRFSGSGSGTDFTLKISRVEAEDVGVYYCMQALQTPYTFGQGTKLEI |
| | | K |
| 149364-nt | 152 | GAAGTGCAGCTTGTCGAATCCGGGGGGGGACTGGTCAAGCCGGGCGGAT |
| ScFv domain | | CACTGAGACTGTCCTGCGCCGCGAGCGGCTTCACGTTCTCCTCCTACTC |
| | | CATGAACTGGGTCCGCCAAGCCCCCGGGAAGGGACTGGAATGGGTGTCC |
| | | TCTATCTCCTCGTCGTCGTCCTACATCTACTACGCCGACTCCGTGAAGG |
| | | GAAGATTCACCATTTCCCGCGACAACGCAAAGAACTCACTGTACTTGCA |
| | | AATGAACTCACTCCGGGCCGAAGATACTGCTGTGTACTATTGCGCCAAG |
| | | ACTATTGCCGCCGTCTACGCTTTCGACATCTGGGGCCAGGGAACCACCG |
| | | TGACTGTGTCGTCCGGTGGTGGTGGCTCGGGCGGAGGAGGAAGCGGCGG |
| | | CGGGGGGTCCGAGATTGTGCTGACCCAGTCGCCACTGAGCCTCCCTGTG |
| | | ACCCCCGAGGAACCCGCCAGCATCAGCTGCCGGTCCAGCCAGTCCCTGC |
| | | TCCACTCCAACGGATACAATTACCTCGATTGGTACCTTCAGAAGCCTGG |
| | | ACAAAGCCCGCAGCTGCTCATCTACTTGGGATCAAACCGCGCGTCAGGA |
| | | GTGCCTGACCGGTTCTCCGGCTCGGGCAGCGGTACCGATTTCACCCTGA |
| | | AAATCTCCAGGGTGGAGGCAGAGGACGTGGGAGTGTATTACTGTATGCA |
| | | GGCGCTGCAGACTCCGTACACATTTGGGCAGGGCACCAAGCTGGAGATC |
| | | AAG |
| 149364-aa | 173 | EVQLVESGGGLVKPGGSLRLSCAASGFTFSSYSMNWVRQAPGKGLEWVS |
| VH | | SISSSSSYIYYADSVKGRFTISRDNAKNSLYLQMNSLRAEDTAVYYCAK |
| | | TIAAVYAFDIWGQGTTVTVSS |
| 149364-aa VL | 194 | EIVLTQSPLSLPVTPEEPASISCRSSQSLLHSNGYNYLDWYLQKPGQSP |
| | | QLLIYLGSNRASGVPDRFSGSGSGTDFTLKISRVEAEDVGVYYCMQALQ |
| | | TPYTFGQGTKLEIK |
| 149364-aa | 215 | MALPVTALLLPLALLLHAARPEVQLVESGGGLVKPGGSLRLSCAASGFT |
| Full CAR | | FSSYSMNWVRQAPGKGLEWVSSISSSSSYIYYADSVKGRFTISRDNAKN |
| | | SLYLQMNSLRAEDTAVYYCAKTIAAVYAFDIWGQGTTVTVSSGGGGSGG |
| | | GGSGGGGSEIVLTQSPLSLPVTPEEPASISCRSSQSLLHSNGYNYLDWY |
| | | LQKPGQSPQLLIYLGSNRASGVPDRFSGSGSGTDFTLKISRVEAEDVGV |
| | | YYCMQALQTPYTFGQGTKLEIKTTTPAPRPPTPAPTIASQPLSLRPEAC |
| | | RPAAGGAVHTRGLDFACDIYIWAPLAGTCGVLLLSLVITLYCKRGRKKL |
| | | LYIFKQPFMRPVQTTQEEDGCSCRFPEEEEGGCELRVKFSRSADAPAYK |
| | | QGQNQLYNELNLGRREEYDVLDKRRGRDPEMGGKPRRKNPQEGLYNELQ |
| | | KDKMAEAYSEIGMKGERRRGKGHDGLYQGLSTATKDTYDALHMQALPPR |
| 149364-nt | 236 | ATGGCCCTCCCTGTCACCGCCCTGCTGCTTCCGCTGGCTCTTCTGCTCC |
| Full CAR | | ACGCCGCTCGGCCCGAAGTGCAGCTTGTCGAATCCGGGGGGGGACTGGT |
| | | CAAGCCGGGCGGATCACTGAGACTGTCCTGCGCCGCGAGCGGCTTCACG |
| | | TTCTCCTCCTACTCCATGAACTGGGTCCGCCAAGCCCCCGGGAAGGGAC |
| | | TGGAATGGGTGTCCTCTATCTCCTCGTCGTCGTCCTACATCTACTACGC |
| | | CGACTCCGTGAAGGGAAGATTCACCATTTCCCGCGACAACGCAAAGAAC |
| | | TCACTGTACTTGCAAATGAACTCACTCCGGGCCGAAGATACTGCTGTGT |
| | | ACTATTGCGCCAAGACTATTGCCGCCGTCTACGCTTTCGACATCTGGGG |
| | | CCAGGGAACCACCGTGACTGTGTCGTCCGGTGGTGGTGGCTCGGGCGGA |
| | | GGAGGAAGCGGCGGCGGGGGGTCCGAGATTGTGCTGACCCAGTCGCCAC |
| | | TGAGCCTCCCTGTGACCCCCGAGGAACCCGCCAGCATCAGCTGCCGGTC |
| | | CAGCCAGTCCCTGCTCCACTCCAACGGATACAATTACCTCGATTGGTAC |
| | | CTTCAGAAGCCTGGACAAAGCCCGCAGCTGCTCATCTACTTGGGATCAA |
| | | ACCGCGCGTCAGGAGTGCCTGACCGGTTCTCCGGCTCGGGCAGCGGTAC |
| | | CGATTTCACCCTGAAAATCTCCAGGGTGGAGGCAGAGGACGTGGGAGTG |
| | | TATTACTGTATGCAGGCGCTGCAGACTCCGTACACATTTGGGCAGGGCA |
| | | CCAAGCTGGAGATCAAGACCACTACCCCAGCACCGAGGCCACCCACCCC |
| | | GGCTCCTACCATCGCCTCCCAGCCTCTGTCCCTGCGTCCGGAGGCATGT |
| | | AGACCCGCAGCTGGTGGGGCCGTGCATACCCGGGGTCTTGACTTCGCCT |
| | | GCGATATCTACATTTGGGCCCCTCTGGCTGGTACTTGCGGGGTCCTGCT |
| | | GCTTTCACTCGTGATCACTCTTTACTGTAAGCGCGGTCGGAAGAAGCTG |
| | | CTGTACATCTTTAAGCAACCCTTCATGAGGCCTGTGCAGACTACTCAAG |
| | | AGGAGGACGGCTGTTCATGCCGGTTCCCAGAGGAGGAGGAAGGCGGCTG |
| | | CGAACTGCGCGTGAAATTCAGCCGCAGCGCAGATGCTCCAGCCTACAAG |
| | | CAGGGGCAGAACCAGCTCTACAACGAACTCAATCTTGGTCGGAGAGAGG |
| | | AGTACGACGTGCTGGACAAGCGGAGAGGACGGGACCCAGAAATGGGCGG |
| | | GAAGCCGCGCAGAAAGAATCCCCAAGAGGGCCTGTACAACGAGCTCCAA |
| | | AAGGATAAGATGGCAGAAGCCTATAGCGAGATTGGTATGAAAGGGGAAC |
| | | GCAGAAGAGGCAAAGGCCACGACGGACTGTACCAGGGACTCAGCACCGC |
| | | CACCAAGGACACCTATGACGCTCTTCACATGCAGGCCCTGCCGCCTCGG |

149365

| | | |
|---|---|---|
| 149365-aa | 132 | EVQLVESGGGLVKPGGSLRLSCAASGFTFSDYYMSWIRQAPGKGLEWVS |
| ScFv domain | | YISSSGSTIYYADSVKGRFTISRDNAKNSLYLQMNSLRAEDTAVYYCAR |
| | | DLRGAFDIWGQGTMVTVSSGGGGSGGGGSGGGGSSYVLTQSPSVSAAPG |
| | | YTATISCGGNNIGTKSVHWYQQKPGQAPLLVIRDDSVRPSKIPGRFSGS |
| | | NSGNMATLTISGVQAGDEADFYCQVWDSDSEHVVFGGGTKLTVL |
| 149365-nt | 153 | GAAGTCCAGCTCGTGGAGTCCGGCGGAGGCCTTGTGAAGCCTGGAGGTT |
| ScFv domain | | CGCTGAGACTGTCCTGCGCCGCCTCCGGCTTCACCTTCTCCGACTACTA |
| | | CATGTCCTGGATCAGACAGGCCCCGGGAAAGGGCCTGGAATGGGTGTCC |
| | | TACATCTCGTCATCGGGCAGCACTATCTACTACGCGGACTCAGTGAAGG |
| | | GGCGGTTCACCATTTCCCGGGATAACGCGAAGAACTCGCTGTATCTGCA |
| | | AATGAACTCACTGAGGGCCGAGGACACCGCCGTGTACTACTGCGCCCGC |
| | | GATCTCCGCGGGGCATTTGACATCTGGGGACAGGGAACCATGGTCACAG |
| | | TGTCCAGCGGAGGGGGAGGATCGGGTGGCGGAGGTTCCGGGGGTGGAGG |
| | | CTCCTCCTACGTGCTGACTCAGAGCCCAAGCGTCAGCGCTGCGCCCGGT |
| | | TACACGGCAACCATCTCCTGTGGCGGAAACAACATTGGGACCAAGTCTG |
| | | TGCACTGGTATCAGCAGAAGCCGGGCCAAGCTCCCCTGTTGGTGATCCG |
| | | CGATGACTCCGTGCGGCCTAGCAAAATTCCGGGACGGTTCTCCGGCTCC |
| | | AACAGCGGCAATATGGCCACTCTCACCATCTCGGGAGTGCAGGCCGGAG |
| | | ATGAAGCCGACTTCTACTGCCAAGTCTGGGACTCAGACTCCGAGCATGT |
| | | GGTGTTCGGGGGCGGAACCAAGCTGACTGTGCTC |
| 149365-aa | 174 | EVQLVESGGGLVKPGGSLRLSCAASGFTFSDYYMSWIRQAPGKGLEWVS |
| VH | | YISSSGSTIYYADSVKGRFTISRDNAKNSLYLQMNSLRAEDTAVYYCAR |
| | | DLRGAFDIWGQGTMVTVSS |
| 149365-aa VL | 195 | SYVLTQSPSVSAAPGYTATISCGGNNIGTKSVHWYQQKPGQAPLLVIRD |
| | | DSVRPSKIPGRFSGSNSGNMATLTISGVQAGDEADFYCQVWDSDSEHVV |
| | | FGGGTKLTVL |
| 149365-aa | 216 | MALPVTALLLPLALLLHAARPEVQLVESGGGLVKPGGSLRLSCAASGFT |
| Full CAR | | FSDYYMSWIRQAPGKGLEWVSYISSSGSTIYYADSVKGRFTISRDNAKN |
| | | SLYLQMNSLRAEDTAVYYCARDLRGAFDIWGQGTMVTVSSGGGGSGGGG |
| | | SGGGGSSYVLTQSPSVSAAPGYTATISCGGNNIGTKSVHWYQQKPGQAP |
| | | LLVIRDDSVRPSKIPGRFSGSNSGNMATLTISGVQAGDEADFYCQVWDS |
| | | DSEHVVFGGGTKLTVLTTTPAPRPPTPAPTIASQPLSLRPEACRPAAGG |
| | | AVHTRGLDFACDIYIWAPLAGTCGVLLLSLVITLYCKRGRKKLLYIFKQ |
| | | PFMRPVQTTQEEDGCSCRFPEEEEGGCELRVKFSRSADAPAYKQGQNQL |
| | | YNELNLGRREEYDVLDKRRGRDPEMGGKPRRKNPQEGLYNELQKDKMAE |
| | | AYSEIGMKGERRRGKGHDGLYQGLSTATKDTYDALHMQALPPR |
| 149365-nt | 237 | ATGGCCCTCCCTGTCACCGCCCTGCTGCTTCCGCTGGCTCTTCTGCTCC |
| Full CAR | | ACGCCGCTCGGCCCGAAGTCCAGCTCGTGGAGTCCGGCGGAGGCCTTGT |
| | | GAAGCCTGGAGGTTCGCTGAGACTGTCCTGCGCCGCCTCCGGCTTCACC |
| | | TTCTCCGACTACTACATGTCCTGGATCAGACAGGCCCCGGGAAAGGGCC |
| | | TGGAATGGGTGTCCTACATCTCGTCATCGGGCAGCACTATCTACTACGC |
| | | GGACTCAGTGAAGGGGCGGTTCACCATTTCCCGGGATAACGCGAAGAAC |
| | | TCGCTGTATCTGCAAATGAACTCACTGAGGGCCGAGGACACCGCCGTGT |
| | | ACTACTGCGCCCGCGATCTCCGCGGGGCATTTGACATCTGGGGACAGGG |
| | | AACCATGGTCACAGTGTCCAGCGGAGGGGGAGGATCGGGTGGCGGAGGT |
| | | TCCGGGGGTGGAGGCTCCTCCTACGTGCTGACTCAGAGCCCAAGCGTCA |
| | | GCGCTGCGCCCGGTTACACGGCAACCATCTCCTGTGGCGGAAACAACAT |
| | | TGGGACCAAGTCTGTGCACTGGTATCAGCAGAAGCCGGGCCAAGCTCCC |
| | | CTGTTGGTGATCCGCGATGACTCCGTGCGGCCTAGCAAAATTCCGGGAC |
| | | GGTTCTCCGGCTCCAACAGCGGCAATATGGCCACTCTCACCATCTCGGG |
| | | AGTGCAGGCCGGAGATGAAGCCGACTTCTACTGCCAAGTCTGGGACTCA |
| | | GACTCCGAGCATGTGGTGTTCGGGGGCGGAACCAAGCTGACTGTGCTCA |
| | | CCACTACCCCAGCACCGAGGCCACCCACCCCGGCTCCTACCATCGCCTC |
| | | CCAGCCTCTGTCCCTGCGTCCGGAGGCATGTAGACCCGCAGCTGGTGGG |
| | | GCCGTGCATACCCGGGGTCTTGACTTCGCCTGCGATATCTACATTTGGG |
| | | CCCCTCTGGCTGGTACTTGCGGGGTCCTGCTGCTTTCACTCGTGATCAC |
| | | TCTTTACTGTAAGCGCGGTCGGAAGAAGCTGCTGTACATCTTTAAGCAA |
| | | CCCTTCATGAGGCCTGTGCAGACTACTCAAGAGGAGGACGGCTGTTCAT |
| | | GCCGGTTCCCAGAGGAGGAGGAAGGCGGCTGCGAACTGCGCGTGAAATT |
| | | CAGCCGCAGCGCAGATGCTCCAGCCTACAAGCAGGGGCAGAACCAGCTC |
| | | TACAACGAACTCAATCTTGGTCGGAGAGAGGAGTACGACGTGCTGGACA |
| | | AGCGGAGAGGACGGGACCCAGAAATGGGCGGGAAGCCGCGCAGAAAGAA |
| | | TCCCCAAGAGGGCCTGTACAACGAGCTCCAAAAGGATAAGATGGCAGAA |
| | | GCCTATAGCGAGATTGGTATGAAAGGGGAACGCAGAAGAGGCAAAGGCC |
| | | ACGACGGACTGTACCAGGGACTCAGCACCGCCACCAAGGACACCTATGA |
| | | CGCTCTTCACATGCAGGCCCTGCCGCCTCGG |

149366

| | | |
|---|---|---|
| 149366-aa | 133 | QVQLVQSGAEVKKPGASVKVSCKPSGYTVTSHYIHWVRRAPGQGLEWMG |
| ScFv domain | | MINPSGGVTAYSQTLQGRVTMTSDTSSSTVYMELSSLRSEDTAMYYCAR |
| | | EGSGSGWYFDFWGRGTLVTVSSGGGGSGGGGSGGGGSSYVLTQPPSVSV |
| | | SPGQTASITCSGDGLSKKYVSWYQQKAGQSPVVLISRDKERPSGIPDRF |
| | | SGSNSADTATLTISGTQAMDEADYYCQAWDDTTVVFGGGTKLTVL |
| 149366-nt | 154 | CAAGTGCAGCTGGTGCAGAGCGGGGCCGAAGTCAAGAAGCCGGGAGCCT |
| ScFv domain | | CCGTGAAAGTGTCCTGCAAGCCTTCGGGATACACCGTGACCTCCCACTA |
| | | CATTCATTGGGTCCGCCGCGCCCCCGGCCAAGGACTCGAGTGGATGGGC |
| | | ATGATCAACCCTAGCGGCGGAGTGACCGCGTACAGCCAGACGCTGCAGG |
| | | GACGCGTGACTATGACCTCGGATACCTCCTCCTCCACCGTCTATATGGA |
| | | ACTGTCCAGCCTGCGGTCCGAGGATACCGCCATGTACTACTGCGCCCGG |
| | | GAAGGATCAGGCTCCGGGTGGTATTTCGACTTCTGGGGAAGAGGCACCC |
| | | TCGTGACTGTGTCATCTGGGGGAGGGGGTTCCGGTGGTGGCGGATCGGG |
| | | AGGAGGCGGTTCATCCTACGTGCTGACCCAGCCACCCTCCGTGTCCGTG |
| | | AGCCCCGGCCAGACTGCATCGATTACATGTAGCGGCGACGGCCTCTCCA |
| | | AGAAATACGTGTCGTGGTACCAGCAGAAGGCCGGACAGAGCCCGGTGGT |
| | | GCTGATCTCAAGAGATAAGGAGCGGCCTAGCGGAATCCCGGACAGGTTC |
| | | TCGGGTTCCAACTCCGCGGACACTGCTACTCTGACCATCTCGGGGACCC |
| | | AGGCTATGGACGAAGCCGATTACTACTGCCAAGCCTGGGACGACACTAC |
| | | TGTCGTGTTTGGAGGGGGCACCAAGTTGACCGTCCTT |
| 149366-aa | 175 | QVQLVQSGAEVKKPGASVKVSCKPSGYTVTSHYIHWVRRAPGQGLEWMG |
| VH | | MINPSGGVTAYSQTLQGRVTMTSDTSSSTVYMELSSLRSEDTAMYYCAR |
| | | EGSGSGWYFDFWGRGTLVTVSS |
| 149366-aa VL | 196 | SYVLTQPPSVSVSPGQTASITCSGDGLSKKYVSWYQQKAGQSPVVLISR |
| | | DKERPSGIPDRFSGSNSADTATLTISGTQAMDEADYYCQAWDDTTVVFG |
| | | GGTKLTVL |
| 149366-aa | 217 | MALPVTALLLPLALLLHAARPQVQLVQSGAEVKKPGASVKVSCKPSGYT |
| Full CAR | | VTSHYIHWVRRAPGQGLEWMGMINPSGGVTAYSQTLQGRVTMTSDTSSS |
| | | TVYMELSSLRSEDTAMYYCAREGSGSGWYFDFWGRGTLVTVSSGGGGSG |
| | | GGGSGGGGSSYVLTQPPSVSVSPGQTASITCSGDGLSKKYVSWYQQKAG |
| | | QSPVVLISRDKERPSGIPDRFSGSNSADTATLTISGTQAMDEADYYCQA |
| | | WDDTTVVFGGGTKLTVLTTTPAPRPPTPAPTIASQPLSLRPEACRPAAG |
| | | GAVHTRGLDFACDIYIWAPLAGTCGVLLLSLVITLYCKRGRKKLLYIFK |
| | | QPFMRPVQTTQEEDGCSCRFPEEEEGGCELRVKFSRSADAPAYKQGQNQ |
| | | LYNELNLGRREEYDVLDKRRGRDPEMGGKPRRKNPQEGLYNELQKDKMA |
| | | EAYSEIGMKGERRRGKGHDGLYQGLSTATKDTYDALHMQALPPR |
| 149366-nt | 238 | ATGGCCCTCCCTGTCACCGCCCTGCTGCTTCCGCTGGCTCTTCTGCTCC |
| Full CAR | | ACGCCGCTCGGCCCCAAGTGCAGCTGGTGCAGAGCGGGGCCGAAGTCAA |
| | | GAAGCCGGGAGCCTCCGTGAAAGTGTCCTGCAAGCCTTCGGGATACACC |
| | | GTGACCTCCCACTACATTCATTGGGTCCGCCGCGCCCCCGGCCAAGGAC |
| | | TCGAGTGGATGGGCATGATCAACCCTAGCGGCGGAGTGACCGCGTACAG |
| | | CCAGACGCTGCAGGGACGCGTGACTATGACCTCGGATACCTCCTCCTCC |
| | | ACCGTCTATATGGAACTGTCCAGCCTGCGGTCCGAGGATACCGCCATGT |
| | | ACTACTGCGCCCGGGAAGGATCAGGCTCCGGGTGGTATTTCGACTTCTG |
| | | GGGAAGAGGCACCCTCGTGACTGTGTCATCTGGGGGAGGGGGTTCCGGT |
| | | GGTGGCGGATCGGGAGGAGGCGGTTCATCCTACGTGCTGACCCAGCCAC |
| | | CCTCCGTGTCCGTGAGCCCCGGCCAGACTGCATCGATTACATGTAGCGG |
| | | CGACGGCCTCTCCAAGAAATACGTGTCGTGGTACCAGCAGAAGGCCGGA |
| | | CAGAGCCCGGTGGTGCTGATCTCAAGAGATAAGGAGCGGCCTAGCGGAA |
| | | TCCCGGACAGGTTCTCGGGTTCCAACTCCGCGGACACTGCTACTCTGAC |
| | | CATCTCGGGGACCCAGGCTATGGACGAAGCCGATTACTACTGCCAAGCC |
| | | TGGGACGACACTACTGTCGTGTTTGGAGGGGGCACCAAGTTGACCGTCC |
| | | TTACCACTACCCCAGCACCGAGGCCACCCACCCCGGCTCCTACCATCGC |
| | | CTCCCAGCCTCTGTCCCTGCGTCCGGAGGCATGTAGACCCGCAGCTGGT |
| | | GGGGCCGTGCATACCCGGGGTCTTGACTTCGCCTGCGATATCTACATTT |
| | | GGGCCCCTCTGGCTGGTACTTGCGGGGTCCTGCTGCTTTCACTCGTGAT |
| | | CACTCTTTACTGTAAGCGCGGTCGGAAGAAGCTGCTGTACATCTTTAAG |
| | | CAACCCTTCATGAGGCCTGTGCAGACTACTCAAGAGGAGGACGGCTGTT |
| | | CATGCCGGTTCCCAGAGGAGGAGGAAGGCGGCTGCGAACTGCGCGTGAA |
| | | ATTCAGCCGCAGCGCAGATGCTCCAGCCTACAAGCAGGGGCAGAACCAG |
| | | CTCTACAACGAACTCAATCTTGGTCGGAGAGAGGAGTACGACGTGCTGG |
| | | ACAAGCGGAGAGGACGGGACCCAGAAATGGGCGGGAAGCCGCGCAGAAA |
| | | GAATCCCCAAGAGGGCCTGTACAACGAGCTCCAAAAGGATAAGATGGCA |
| | | GAAGCCTATAGCGAGATTGGTATGAAAGGGGAACGCAGAAGAGGCAAAG |
| | | GCCACGACGGACTGTACCAGGGACTCAGCACCGCCACCAAGGACACCTA |
| | | TGACGCTCTTCACATGCAGGCCCTGCCGCCTCGG |

149367

| | | |
|---|---|---|
| 149367-aa | 134 | QVQLQESGPGLVKPSQTLSLTCTVSGGSISSGGYYWSWIRQHPGKGLEW |
| ScFv domain | | IGYIYYSGSTYYNPSLKSRVTISVDTSKNQFSLKLSSVTAADTAVYYCA |
| | | RAGIAARLRGAFDIWGQGTMVTVSSGGGGSGGGGSGGGGSDIVMTQSPS |
| | | SVSASVGDRVIITCRASQGIRNWLAWYQQKPGKAPNLLIYAASNLQSGV |
| | | PSRFSGSGSGADFTLTISSLQPEDVATYYCQKYNSAPFTFGPGTKVDIK |
| 149367-nt | 155 | CAAGTGCAGCTTCAGGAGAGCGGCCCGGGACTCGTGAAGCCGTCCCAGA |
| ScFv domain | | CCCTGTCCCTGACTTGCACCGTGTCGGGAGGAAGCATCTCGAGCGGAGG |
| | | CTACTATTGGTCGTGGATTCGGCAGCACCCTGGAAAGGGCCTGGAATGG |
| | | ATCGGCTACATCTACTACTCCGGCTCGACCTACTACAACCCATCGCTGA |
| | | AGTCCAGAGTGACAATCTCAGTGGACACGTCCAAGAATCAGTTCAGCCT |
| | | GAAGCTCTCTTCCGTGACTGCGGCCGACACCGCCGTGTACTACTGCGCA |
| | | CGCGCTGGAATTGCCGCCCGGCTGAGGGGTGCCTTCGACATTTGGGGAC |
| | | AGGGCACCATGGTCACCGTGTCCTCCGGCGGCGGAGGTTCCGGGGGTGG |
| | | AGGCTCAGGAGGAGGGGGGTCCGACATCGTCATGACTCAGTCGCCCTCA |
| | | AGCGTCAGCGCGTCCGTCGGGGACAGAGTGATCATCACCTGTCGGGCGT |
| | | CCCAGGGAATTCGCAACTGGCTGGCCTGGTATCAGCAGAAGCCCGGAAA |
| | | GGCCCCCAACCTGTTGATCTACGCCGCCTCAAACCTCCAATCCGGGGTG |
| | | CCGAGCCGCTTCAGCGGCTCCGGTTCGGGTGCCGATTTCACTCTGACCA |
| | | TCTCCTCCCTGCAACCTGAAGATGTGGCTACCTACTACTGCCAAAAGTA |
| | | CAACTCCGCACCTTTTACTTTCGGACCGGGGACCAAAGTGGACATTAAG |
| 149367-aa | 176 | QVQLQESGPGLVKPSQTLSLTCTVSGGSISSGGYYWSWIRQHPGKGLEW |
| VH | | IGYIYYSGSTYYNPSLKSRVTISVDTSKNQFSLKLSSVTAADTAVYYCA |
| | | RAGIAARLRGAFDIWGQGTMVTVSS |
| 149367-aa VL | 197 | DIVMTQSPSSVSASVGDRVIITCRASQGIRNWLAWYQQKPGKAPNLLIY |
| | | AASNLQSGVPSRFSGSGSGADFTLTISSLQPEDVATYYCQKYNSAPFTF |
| | | GPGTKVDIK |
| 149367-aa | 218 | MALPVTALLLPLALLLHAARPQVQLQESGPGLVKPSQTLSLTCTVSGGS |
| Full CAR | | ISSGGYYWSWIRQHPGKGLEWIGYIYYSGSTYYNPSLKSRVTISVDTSK |
| | | NQFSLKLSSVTAADTAVYYCARAGIAARLRGAFDIWGQGTMVTVSSGGG |
| | | GSGGGGSGGGGSDIVMTQSPSSVSASVGDRVIITCRASQGIRNWLAWYQ |
| | | QKPGKAPNLLIYAASNLQSGVPSRFSGSGSGADFTLTISSLQPEDVATY |
| | | YCQKYNSAPFTFGPGTKVDIKTTTPAPRPPTPAPTIASQPLSLRPEACR |
| | | PAAGGAVHTRGLDFACDIYIWAPLAGTCGVLLLSLVITLYCKRGRKKLL |
| | | YIFKQPFMRPVQTTQEEDGCSCRFPEEEEGGCELRVKFSRSADAPAYKQ |
| | | GQNQLYNELNLGRREEYDVLDKRRGRDPEMGGKPRRKNPQEGLYNELQK |
| | | DKMAEAYSEIGMKGERRRGKGHDGLYQGLSTATKDTYDALHMQALPPR |
| 149367-nt | 239 | ATGGCCCTCCCTGTCACCGCCCTGCTGCTTCCGCTGGCTCTTCTGCTCC |
| Full CAR | | ACGCCGCTCGGCCCCAAGTGCAGCTTCAGGAGAGCGGCCCGGGACTCGT |
| | | GAAGCCGTCCCAGACCCTGTCCCTGACTTGCACCGTGTCGGGAGGAAGC |
| | | ATCTCGAGCGGAGGCTACTATTGGTCGTGGATTCGGCAGCACCCTGGAA |
| | | AGGGCCTGGAATGGATCGGCTACATCTACTACTCCGGCTCGACCTACTA |
| | | CAACCCATCGCTGAAGTCCAGAGTGACAATCTCAGTGGACACGTCCAAG |
| | | AATCAGTTCAGCCTGAAGCTCTCTTCCGTGACTGCGGCCGACACCGCCG |
| | | TGTACTACTGCGCACGCGCTGGAATTGCCGCCCGGCTGAGGGGTGCCTT |
| | | CGACATTTGGGGACAGGGCACCATGGTCACCGTGTCCTCCGGCGGCGGA |
| | | GGTTCCGGGGGTGGAGGCTCAGGAGGAGGGGGGTCCGACATCGTCATGA |
| | | CTCAGTCGCCCTCAAGCGTCAGCGCGTCCGTCGGGGACAGAGTGATCAT |
| | | CACCTGTCGGGCGTCCCAGGGAATTCGCAACTGGCTGGCCTGGTATCAG |
| | | CAGAAGCCCGGAAAGGCCCCCAACCTGTTGATCTACGCCGCCTCAAACC |
| | | TCCAATCCGGGGTGCCGAGCCGCTTCAGCGGCTCCGGTTCGGGTGCCGA |
| | | TTTCACTCTGACCATCTCCTCCCTGCAACCTGAAGATGTGGCTACCTAC |
| | | TACTGCCAAAAGTACAACTCCGCACCTTTTACTTTCGGACCGGGGACCA |
| | | AAGTGGACATTAAGACCACTACCCCAGCACCGAGGCCACCCACCCCGGC |
| | | TCCTACCATCGCCTCCCAGCCTCTGTCCCTGCGTCCGGAGGCATGTAGA |
| | | CCCGCAGCTGGTGGGGCCGTGCATACCCGGGGTCTTGACTTCGCCTGCG |
| | | ATATCTACATTTGGGCCCCTCTGGCTGGTACTTGCGGGGTCCTGCTGCT |
| | | TTCACTCGTGATCACTCTTTACTGTAAGCGCGGTCGGAAGAAGCTGCTG |
| | | TACATCTTTAAGCAACCCTTCATGAGGCCTGTGCAGACTACTCAAGAGG |
| | | AGGACGGCTGTTCATGCCGGTTCCCAGAGGAGGAGGAAGGCGGCTGCGA |
| | | ACTGCGCGTGAAATTCAGCCGCAGCGCAGATGCTCCAGCCTACAAGCAG |
| | | GGGCAGAACCAGCTCTACAACGAACTCAATCTTGGTCGGAGAGAGGAGT |
| | | ACGACGTGCTGGACAAGCGGAGAGGACGGGACCCAGAAATGGGCGGGAA |
| | | GCCGCGCAGAAAGAATCCCCAAGAGGGCCTGTACAACGAGCTCCAAAAG |
| | | GATAAGATGGCAGAAGCCTATAGCGAGATTGGTATGAAAGGGGAACGCA |
| | | GAAGAGGCAAAGGCCACGACGGACTGTACCAGGGACTCAGCACCGCCAC |
| | | CAAGGACACCTATGACGCTCTTCACATGCAGGCCCTGCCGCCTCGG |

149368

| | | |
|---|---|---|
| 149368-aa | 135 | QVQLVQSGAEVKKPGSSVKVSCKASGGTFSSYAISWVRQAPGQGLEWMG |
| ScFv domain | | GIIPIFGTANYAQKFQGRVTITADESTSTAYMELSSLRSEDTAVYYCAR |
| | | RGGYQLLRWDVGLLRSAFDIWGQGTMVTVSSGGGGSGGGGSGGGGSSYV |
| | | LTQPPSVSVAPGQTARITCGGNNIGSKSVHWYQQKPGQAPVLVLYGKNN |
| | | RPSGVPDRFSGSRSGTTASLTITGAQAEDEADYYCSSRDSSGDHLRVFG |
| | | TGTKVTVL |
| 149368-nt | 156 | CAAGTGCAGCTGGTCCAGTCGGGCGCCGAGGTCAAGAAGCCCGGGAGCT |
| ScFv domain | | CTGTGAAAGTGTCCTGCAAGGCCTCCGGGGGCACCTTTAGCTCCTACGC |
| | | CATCTCCTGGGTCCGCCAAGCACCGGGTCAAGGCCTGGAGTGGATGGGG |
| | | GGAATTATCCCTATCTTCGGCACTGCCAACTACGCCCAGAAGTTCCAGG |
| | | GACGCGTGACCATTACCGCGGACGAATCCACCTCCACCGCTTATATGGA |
| | | GCTGTCCAGCTTGCGCTCGGAAGATACCGCCGTGTACTACTGCGCCCGG |
| | | AGGGGTGGATACCAGCTGCTGAGATGGGACGTGGGCCTCCTGCGGTCGG |
| | | CGTTCGACATCTGGGGCCAGGGCACTATGGTCACTGTGTCCAGCGGAGG |
| | | AGGCGGATCGGGAGGCGGCGGATCAGGGGGAGGCGGTTCCAGCTACGTG |
| | | CTTACTCAACCCCCTTCGGTGTCCGTGGCCCCGGGACAGACCGCCAGAA |
| | | TCACTTGCGGAGGAAACAACATTGGGTCCAAGAGCGTGCATTGGTACCA |
| | | GCAGAAGCCAGGACAGGCCCCTGTGCTGGTGCTCTACGGGAAGAACAAT |
| | | CGGCCCAGCGGAGTGCCGGACAGGTTCTCGGGTTCACGCTCCGGTACAA |
| | | CCGCTTCACTGACTATCACCGGGGCCCAGGCAGAGGATGAAGCGGACTA |
| | | CTACTGTTCCTCCCGGGATTCATCCGGCGACCACCTCCGGGTGTTCGGA |
| | | ACCGGAACGAAGGTCACCGTGCTG |
| 149368-aa | 177 | QVQLVQSGAEVKKPGSSVKVSCKASGGTFSSYAISWVRQAPGQGLEWMG |
| VH | | GIIPIFGTANYAQKFQGRVTITADESTSTAYMELSSLRSEDTAVYYCAR |
| | | RGGYQLLRWDVGLLRSAFDIWGQGTMVTVSS |
| 149368-aa VL | 198 | SYVLTQPPSVSVAPGQTARITCGGNNIGSKSVHWYQQKPGQAPVLVLYG |
| | | KNNRPSGVPDRFSGSRSGTTASLTITGAQAEDEADYYCSSRDSSGDHLR |
| | | VFGTGTKVTVL |
| 149368-aa | 219 | MALPVTALLLPLALLLHAARPQVQLVQSGAEVKKPGSSVKVSCKASGGT |
| Full CAR | | FSSYAISWVRQAPGQGLEWMGGIIPIFGTANYAQKFQGRVTITADESTS |
| | | TAYMELSSLRSEDTAVYYCARRGGYQLLRWDVGLLRSAFDIWGQGTMVT |
| | | VSSGGGGSGGGGSGGGGSSYVLTQPPSVSVAPGQTARITCGGNNIGSKS |
| | | VHWYQQKPGQAPVLVLYGKNNRPSGVPDRFSGSRSGTTASLTITGAQAE |
| | | DEADYYCSSRDSSGDHLRVFGTGTKVTVLTTTPAPRPPTPAPTIASQPL |
| | | SLRPEACRPAAGGAVHTRGLDFACDIYIWAPLAGTCGVLLLSLVITLYC |
| | | KRGRKKLLYIFKQPFMRPVQTTQEEDGCSCRFPEEEEGGCELRVKFSRS |
| | | ADAPAYKQGQNQLYNELNLGRREEYDVLDKRRGRDPEMGGKPRRKNPQE |
| | | GLYNELQKDKMAEAYSEIGMKGERRRGKGHDGLYQGLSTATKDTYDALH |
| | | MQALPPR |
| 149368-nt | 240 | ATGGCCCTCCCTGTCACCGCCCTGCTGCTTCCGCTGGCTCTTCTGCTCC |
| Full CAR | | ACGCCGCTCGGCCCCAAGTGCAGCTGGTCCAGTCGGGCGCCGAGGTCAA |
| | | GAAGCCCGGGAGCTCTGTGAAAGTGTCCTGCAAGGCCTCCGGGGGCACC |
| | | TTTAGCTCCTACGCCATCTCCTGGGTCCGCCAAGCACCGGGTCAAGGCC |
| | | TGGAGTGGATGGGGGGAATTATCCCTATCTTCGGCACTGCCAACTACGC |
| | | CCAGAAGTTCCAGGGACGCGTGACCATTACCGCGGACGAATCCACCTCC |
| | | ACCGCTTATATGGAGCTGTCCAGCTTGCGCTCGGAAGATACCGCCGTGT |
| | | ACTACTGCGCCCGGAGGGGTGGATACCAGCTGCTGAGATGGGACGTGGG |
| | | CCTCCTGCGGTCGGCGTTCGACATCTGGGGCCAGGGCACTATGGTCACT |
| | | GTGTCCAGCGGAGGAGGCGGATCGGGAGGCGGCGGATCAGGGGGAGGCG |
| | | GTTCCAGCTACGTGCTTACTCAACCCCCTTCGGTGTCCGTGGCCCCGGG |
| | | ACAGACCGCCAGAATCACTTGCGGAGGAAACAACATTGGGTCCAAGAGC |
| | | GTGCATTGGTACCAGCAGAAGCCAGGACAGGCCCCTGTGCTGGTGCTCT |
| | | ACGGGAAGAACAATCGGCCCAGCGGAGTGCCGGACAGGTTCTCGGGTTC |
| | | ACGCTCCGGTACAACCGCTTCACTGACTATCACCGGGGCCCAGGCAGAG |
| | | GATGAAGCGGACTACTACTGTTCCTCCCGGGATTCATCCGGCGACCACC |
| | | TCCGGGTGTTCGGAACCGGAACGAAGGTCACCGTGCTGACCACTACCCC |
| | | AGCACCGAGGCCACCCACCCCGGCTCCTACCATCGCCTCCCAGCCTCTG |
| | | TCCCTGCGTCCGGAGGCATGTAGACCCGCAGCTGGTGGGGCCGTGCATA |
| | | CCCGGGGTCTTGACTTCGCCTGCGATATCTACATTTGGGCCCCTCTGGC |
| | | TGGTACTTGCGGGGTCCTGCTGCTTTCACTCGTGATCACTCTTTACTGT |
| | | AAGCGCGGTCGGAAGAAGCTGCTGTACATCTTTAAGCAACCCTTCATGA |
| | | GGCCTGTGCAGACTACTCAAGAGGAGGACGGCTGTTCATGCCGGTTCCC |
| | | AGAGGAGGAGGAAGGCGGCTGCGAACTGCGCGTGAAATTCAGCCGCAGC |
| | | GCAGATGCTCCAGCCTACAAGCAGGGGCAGAACCAGCTCTACAACGAAC |
| | | TCAATCTTGGTCGGAGAGAGGAGTACGACGTGCTGGACAAGCGGAGAGG |
| | | ACGGGACCCAGAAATGGGCGGGAAGCCGCGCAGAAAGAATCCCCAAGAG |
| | | GGCCTGTACAACGAGCTCCAAAAGGATAAGATGGCAGAAGCCTATAGCG |
| | | AGATTGGTATGAAAGGGGAACGCAGAAGAGGCAAAGGCCACGACGGACT |
| | | GTACCAGGGACTCAGCACCGCCACCAAGGACACCTATGACGCTCTTCAC |
| | | ATGCAGGCCCTGCCGCCTCGG |

149369

| | | |
|---|---|---|
| 149369-aa | 136 | EVQLQQSGPGLVKPSQTLSLTCAISGDSVSSNSAAWNWIRQSPSRGLEW |
| ScFv domain | | LGRTYYRSKWYSFYAISLKSRIIINPDTSKNQFSLQLKSVTPEDTAVYY |
| | | CARSSPEGLFLYWFDPWGQGTLVTVSSGGDGSGGGGSGGGGSSSELTQD |
| | | PAVSVALGQTIRITCQGDSLGNYYATWYQQKPGQAPVLVIYGTNNRPSG |
| | | IPDRFSASSSGNTASLTITGAQAEDEADYYCNSRDSSGHHLLFGTGTKV |
| | | TVL |
| 149369-nt | 157 | GAAGTGCAGCTCCAACAGTCAGGACCGGGGCTCGTGAAGCCATCCCAGA |
| ScFv domain | | CCCTGTCCCTGACTTGTGCCATCTCGGGAGATAGCGTGTCATCGAACTC |
| | | CGCCGCCTGGAACTGGATTCGGCAGAGCCCGTCCCGCGGACTGGAGTGG |
| | | CTTGGAAGGACCTACTACCGGTCCAAGTGGTACTCTTTCTACGCGATCT |
| | | CGCTGAAGTCCCGCATTATCATTAACCCTGATACCTCCAAGAATCAGTT |
| | | CTCCCTCCAACTGAAATCCGTCACCCCCGAGGACACAGCAGTGTATTAC |
| | | TGCGCACGGAGCAGCCCCGAAGGACTGTTCCTGTATTGGTTTGACCCCT |
| | | GGGGCCAGGGGACTCTTGTGACCGTGTCGAGCGGCGGAGATGGGTCCGG |
| | | TGGCGGTGGTTCGGGGGGCGGCGGATCATCATCCGAACTGACCCAGGAC |
| | | CCGGCTGTGTCCGTGGCGCTGGGACAAACCATCCGCATTACGTGCCAGG |
| | | GAGACTCCCTGGGCAACTACTACGCCACTTGGTACCAGCAGAAGCCGGG |
| | | CCAAGCCCCTGTGTTGGTCATCTACGGGACCAACAACAGACCTTCCGGC |
| | | ATCCCCGACCGGTTCAGCGCTTCGTCCTCCGGCAACACTGCCAGCCTGA |
| | | CCATCACTGGAGCGCAGGCCGAAGATGAGGCCGACTACTACTGCAACAG |
| | | CAGAGACTCCTCGGGTCATCACCTCTTGTTCGGAACTGGAACCAAGGTC |
| | | ACCGTGCTG |
| 149369-aa | 178 | EVQLQQSGPGLVKPSQTLSLTCAISGDSVSSNSAAWNWIRQSPSRGLEW |
| VH | | LGRTYYRSKWYSFYAISLKSRIIINPDTSKNQFSLQLKSVTPEDTAVYY |
| | | CARSSPEGLFLYWFDPWGQGTLVTVSS |
| 149369-aa VL | 199 | SSELTQDPAVSVALGQTIRITCQGDSLGNYYATWYQQKPGQAPVLVIYG |
| | | TNNRPSGIPDRFSASSSGNTASLTITGAQAEDEADYYCNSRDSSGHHLL |
| | | FGTGTKVTVL |
| 149369-aa | 220 | MALPVTALLLPLALLLHAARPEVQLQQSGPGLVKPSQTLSLTCAISGDS |
| Full CAR | | VSSNSAAWNWIRQSPSRGLEWLGRTYYRSKWYSFYAISLKSRIIINPDT |
| | | SKNQFSLQLKSVTPEDTAVYYCARSSPEGLFLYWFDPWGQGTLVTVSSG |
| | | GDGSGGGGSGGGGSSSELTQDPAVSVALGQTIRITCQGDSLGNYYATWY |
| | | QQKPGQAPVLVIYGTNNRPSGIPDRFSASSSGNTASLTITGAQAEDEAD |
| | | YYCNSRDSSGHHLLFGTGTKVTVLTTTPAPRPPTPAPTIASQPLSLRPE |
| | | ACRPAAGGAVHTRGLDFACDIYIWAPLAGTCGVLLLSLVITLYCKRGRK |
| | | KLLYIFKQPFMRPVQTTQEEDGCSCRFPEEEEGGCELRVKFSRSADAPA |
| | | YKQGQNQLYNELNLGRREEYDVLDKRRGRDPEMGGKPRRKNPQEGLYNE |
| | | LQKDKMAEAYSEIGMKGERRRGKGHDGLYQGLSTATKDTYDALHMQALP |
| | | PR |
| 149369-nt | 241 | ATGGCCCTCCCTGTCACCGCCCTGCTGCTTCCGCTGGCTCTTCTGCTCC |
| Full CAR | | ACGCCGCTCGGCCCGAAGTGCAGCTCCAACAGTCAGGACCGGGGCTCGT |
| | | GAAGCCATCCCAGACCCTGTCCCTGACTTGTGCCATCTCGGGAGATAGC |
| | | GTGTCATCGAACTCCGCCGCCTGGAACTGGATTCGGCAGAGCCCGTCCC |
| | | GCGGACTGGAGTGGCTTGGAAGGACCTACTACCGGTCCAAGTGGTACTC |
| | | TTTCTACGCGATCTCGCTGAAGTCCCGCATTATCATTAACCCTGATACC |
| | | TCCAAGAATCAGTTCTCCCTCCAACTGAAATCCGTCACCCCCGAGGACA |
| | | CAGCAGTGTATTACTGCGCACGGAGCAGCCCCGAAGGACTGTTCCTGTA |
| | | TTGGTTTGACCCCTGGGGCCAGGGGACTCTTGTGACCGTGTCGAGCGGC |
| | | GGAGATGGGTCCGGTGGCGGTGGTTCGGGGGGCGGCGGATCATCATCCG |
| | | AACTGACCCAGGACCCGGCTGTGTCCGTGGCGCTGGGACAAACCATCCG |
| | | CATTACGTGCCAGGGAGACTCCCTGGGCAACTACTACGCCACTTGGTAC |
| | | CAGCAGAAGCCGGGCCAAGCCCCTGTGTTGGTCATCTACGGGACCAACA |
| | | ACAGACCTTCCGGCATCCCCGACCGGTTCAGCGCTTCGTCCTCCGGCAA |
| | | CACTGCCAGCCTGACCATCACTGGAGCGCAGGCCGAAGATGAGGCCGAC |
| | | TACTACTGCAACAGCAGAGACTCCTCGGGTCATCACCTCTTGTTCGGAA |
| | | CTGGAACCAAGGTCACCGTGCTGACCACTACCCCAGCACCGAGGCCACC |
| | | CACCCCGGCTCCTACCATCGCCTCCCAGCCTCTGTCCCTGCGTCCGGAG |
| | | GCATGTAGACCCGCAGCTGGTGGGGCCGTGCATACCCGGGGTCTTGACT |
| | | TCGCCTGCGATATCTACATTTGGGCCCCTCTGGCTGGTACTTGCGGGGT |
| | | CCTGCTGCTTTCACTCGTGATCACTCTTTACTGTAAGCGCGGTCGGAAG |
| | | AAGCTGCTGTACATCTTTAAGCAACCCTTCATGAGGCCTGTGCAGACTA |
| | | CTCAAGAGGAGGACGGCTGTTCATGCCGGTTCCCAGAGGAGGAGGAAGG |
| | | CGGCTGCGAACTGCGCGTGAAATTCAGCCGCAGCGCAGATGCTCCAGCC |
| | | TACAAGCAGGGGCAGAACCAGCTCTACAACGAACTCAATCTTGGTCGGA |
| | | GAGAGGAGTACGACGTGCTGGACAAGCGGAGAGGACGGGACCCAGAAAT |
| | | GGGCGGGAAGCCGCGCAGAAAGAATCCCCAAGAGGGCCTGTACAACGAG |
| | | CTCCAAAAGGATAAGATGGCAGAAGCCTATAGCGAGATTGGTATGAAAG |
| | | GGGAACGCAGAAGAGGCAAAGGCCACGACGGACTGTACCAGGGACTCAG |
| | | CACCGCCACCAAGGACACCTATGACGCTCTTCACATGCAGGCCCTGCCG |
| | | CCTCGG |

BCMA_EBB-C1978-A4

| | | |
|---|---|---|
| BCMA_EBB- | 137 | EVQLVESGGGLVQPGGSLRLSCAASGFTFSSYAMSWVRQAPGKGLEWVS |
| C1978-A4- | | AISGSGGSTYYADSVKGRFTISRDNSKNTLYLQMNSLRAEDTAVYYCAK |
| aa | | VEGSGSLDYWGQGTLVTVSSGGGGSGGGGSGGGGSEIVMTQSPGTLSLS |
| ScFv domain | | PGERATLSCRASQSVSSAYLAWYQQKPGQPPRLLISGASTRATGIPDRF |
| | | GGSGSGTDFTLTISRLEPEDFAVYYCQHYGSSFNGSSLFTFGQGTRLEI |
| | | K |
| BCMA_EBB- | 158 | GAAGTGCAGCTCGTGGAGTCAGGAGGCGGCCTGGTCCAGCCGGGAGGGT |
| C1978-A4-nt | | CCCTTAGACTGTCATGCGCCGCAAGCGGATTCACTTTCTCCTCCTATGC |
| ScFv domain | | CATGAGCTGGGTCCGCCAAGCCCCCGGAAAGGGACTGGAATGGGTGTCC |
| | | GCCATCTCGGGGTCTGGAGGCTCAACTTACTACGCTGACTCCGTGAAGG |
| | | GACGGTTCACCATTAGCCGCGACAACTCCAAGAACACCCTCTACCTCCA |
| | | AATGAACTCCCTGCGGGCCGAGGATACCGCCGTCTACTACTGCGCCAAA |
| | | GTGGAAGGTTCAGGATCGCTGGACTACTGGGGACAGGGTACTCTCGTGA |
| | | CCGTGTCATCGGGCGGAGGAGGTTCCGGCGGTGGCGGCTCCGGCGGCGG |
| | | AGGGTCGGAGATCGTGATGACCCAGAGCCCTGGTACTCTGAGCCTTTCG |
| | | CCGGGAGAAAGGGCCACCCTGTCCTGCCGCGCTTCCCAATCCGTGTCCT |
| | | CCGCGTACTTGGCGTGGTACCAGCAGAAGCCGGGACAGCCCCCTCGGCT |
| | | GCTGATCAGCGGGGCCAGCACCCGGGCAACCGGAATCCCAGACAGATTC |
| | | GGGGGTTCCGGCAGCGGCACAGATTTCACCCTGACTATTTCGAGGTTGG |
| | | AGCCCGAGGACTTTGCGGTGTATTACTGTCAGCACTACGGGTCGTCCTT |
| | | TAATGGCTCCAGCCTGTTCACGTTCGGACAGGGGACCCGCCTGGAAATC |
| | | AAG |
| BCMA_EBB- | 179 | EVQLVESGGGLVQPGGSLRLSCAASGFTFSSYAMSWVRQAPGKGLEWVS |
| C1978-A4- | | AISGSGGSTYYADSVKGRFTISRDNSKNTLYLQMNSLRAEDTAVYYCAK |
| aa | | VEGSGSLDYWGQGTLVTVSS |
| VH | | |
| BCMA_EBB- | 200 | EIVMTQSPGTLSLSPGERATLSCRASQSVSSAYLAWYQQKPGQPPRLLI |
| C1978-A4- | | SGASTRATGIPDRFGGSGSGTDFTLTISRLEPEDFAVYYCQHYGSSFNG |
| aa | | SSLFTFGQGTRLEIK |
| VL | | |
| BCMA_EBB- | 221 | MALPVTALLLPLALLLHAARPEVQLVESGGGLVQPGGSLRLSCAASGFT |
| C1978-A4- | | FSSYAMSWVRQAPGKGLEWVSAISGSGGSTYYADSVKGRFTISRDNSKN |
| aa | | TLYLQMNSLRAEDTAVYYCAKVEGSGSLDYWGQGTLVTVSSGGGGSGGG |
| Full CART | | GSGGGGSEIVMTQSPGTLSLSPGERATLSCRASQSVSSAYLAWYQQKPG |
| | | QPPRLLISGASTRATGIPDRFGGSGSGTDFTLTISRLEPEDFAVYYCQH |
| | | YGSSFNGSSLFTFGQGTRLEIKTTTPAPRPPTPAPTIASQPLSLRPEAC |
| | | RPAAGGAVHTRGLDFACDIYIWAPLAGTCGVLLLSLVITLYCKRGRKKL |
| | | LYIFKQPFMRPVQTTQEEDGCSCRFPEEEEGGCELRVKFSRSADAPAYK |
| | | QGQNQLYNELNLGRREEYDVLDKRRGRDPEMGGKPRRKNPQEGLYNELQ |
| | | KDKMAEAYSEIGMKGERRRGKGHDGLYQGLSTATKDTYDALHMQALPPR |
| BCMA_EBB- | 242 | ATGGCCCTCCCTGTCACCGCCCTGCTGCTTCCGCTGGCTCTTCTGCTCC |
| C1978-A4-nt | | ACGCCGCTCGGCCCGAAGTGCAGCTCGTGGAGTCAGGAGGCGGCCTGGT |
| Full CART | | CCAGCCGGGAGGGTCCCTTAGACTGTCATGCGCCGCAAGCGGATTCACT |
| | | TTCTCCTCCTATGCCATGAGCTGGGTCCGCCAAGCCCCCGGAAAGGGAC |
| | | TGGAATGGGTGTCCGCCATCTCGGGGTCTGGAGGCTCAACTTACTACGC |
| | | TGACTCCGTGAAGGGACGGTTCACCATTAGCCGCGACAACTCCAAGAAC |
| | | ACCCTCTACCTCCAAATGAACTCCCTGCGGGCCGAGGATACCGCCGTCT |
| | | ACTACTGCGCCAAAGTGGAAGGTTCAGGATCGCTGGACTACTGGGGACA |
| | | GGGTACTCTCGTGACCGTGTCATCGGGCGGAGGAGGTTCCGGCGGTGGC |
| | | GGCTCCGGCGGCGGAGGGTCGGAGATCGTGATGACCCAGAGCCCTGGTA |
| | | CTCTGAGCCTTTCGCCGGGAGAAAGGGCCACCCTGTCCTGCCGCGCTTC |
| | | CCAATCCGTGTCCTCCGCGTACTTGGCGTGGTACCAGCAGAAGCCGGGA |
| | | CAGCCCCCTCGGCTGCTGATCAGCGGGGCCAGCACCCGGGCAACCGGAA |
| | | TCCCAGACAGATTCGGGGGTTCCGGCAGCGGCACAGATTTCACCCTGAC |
| | | TATTTCGAGGTTGGAGCCCGAGGACTTTGCGGTGTATTACTGTCAGCAC |
| | | TACGGGTCGTCCTTTAATGGCTCCAGCCTGTTCACGTTCGGACAGGGGA |
| | | CCCGCCTGGAAATCAAGACCACTACCCCAGCACCGAGGCCACCCACCCC |
| | | GGCTCCTACCATCGCCTCCCAGCCTCTGTCCCTGCGTCCGGAGGCATGT |
| | | AGACCCGCAGCTGGTGGGGCCGTGCATACCCGGGGTCTTGACTTCGCCT |
| | | GCGATATCTACATTTGGGCCCCTCTGGCTGGTACTTGCGGGGTCCTGCT |
| | | GCTTTCACTCGTGATCACTCTTTACTGTAAGCGCGGTCGGAAGAAGCTG |
| | | CTGTACATCTTTAAGCAACCCTTCATGAGGCCTGTGCAGACTACTCAAG |
| | | AGGAGGACGGCTGTTCATGCCGGTTCCCAGAGGAGGAGGAAGGCGGCTG |
| | | CGAACTGCGCGTGAAATTCAGCCGCAGCGCAGATGCTCCAGCCTACAAG |
| | | CAGGGGCAGAACCAGCTCTACAACGAACTCAATCTTGGTCGGAGAGAGG |
| | | AGTACGACGTGCTGGACAAGCGGAGAGGACGGGACCCAGAAATGGGCGG |
| | | GAAGCCGCGCAGAAAGAATCCCCAAGAGGGCCTGTACAACGAGCTCCAA |
| | | AAGGATAAGATGGCAGAAGCCTATAGCGAGATTGGTATGAAAGGGGAAC |
| | | GCAGAAGAGGCAAAGGCCACGACGGACTGTACCAGGGACTCAGCACCGC |
| | | CACCAAGGACACCTATGACGCTCTTCACATGCAGGCCCTGCCGCCTCGG |

BCMA_EBB-C1978-G1

| | | |
|---|---|---|
| BCMA_EBB- | 138 | EVQLVETGGGLVQPGGSLRLSCAASGITFSRYPMSWVRQAPGKGL |
| C1978-G1- | | EWVSGISDSGVSTYYADSAKGRFTISRDNSKNTLFLQMSSLRDEDT |
| aa | | AVYYCVTRAGSEASDIWGQGTMVTVSSGGGGSGGGGSGGGGSEI |
| ScFv domain | | VLTQSPATLSLSPGERATLSCRASQSVSNSLAWYQQKPGQAPRLLI |
| | | YDASSRATGIPDRFSGSGSGTDFTLTISRLEPEDFAIYYCQQFGTSSG |
| | | LTFGGGTKLEIK |
| BCMA_EBB- | 159 | GAAGTGCAACTGGTGGAAACCGGTGGCGGCCTGGTGCAGCCTGGAGGAT |
| C1978-G1- | | CATTGAGGCTGTCATGCGCGGCCAGCGGTATTACCTTCTCCCGGTACCC |
| nt | | CATGTCCTGGGTCAGACAGGCCCCGGGGAAAGGGCTTGAATGGGTGTCC |
| ScFv domain | | GGGATCTCGGACTCCGGTGTCAGCACTTACTACGCCGACTCCGCCAAGG |
| | | GACGCTTCACCATTTCCCGGGACAACTCGAAGAACACCCTGTTCCTCCA |
| | | AATGAGCTCCCTCCGGGACGAGGATACTGCAGTGTACTACTGCGTGACC |
| | | CGCGCCGGGTCCGAGGCGTCTGACATTTGGGGACAGGGCACTATGGTCA |
| | | CCGTGTCGTCCGGCGGAGGGGGCTCGGGAGGCGGTGGCAGCGGAGGAGG |
| | | AGGGTCCGAGATCGTGCTGACCCAATCCCCGGCCACCCTCTCGCTGAGC |
| | | CCTGGAGAAAGGGCAACCTTGTCCTGTCGCGCGAGCCAGTCCGTGAGCA |
| | | ACTCCCTGGCCTGGTACCAGCAGAAGCCCGGACAGGCTCCGAGACTTCT |
| | | GATCTACGACGCTTCGAGCCGGGCCACTGGAATCCCCGACCGCTTTTCG |
| | | GGGTCCGGCTCAGGAACCGATTTCACCCTGACAATCTCACGGCTGGAGC |
| | | CAGAGGATTTCGCCATCTATTACTGCCAGCAGTTCGGTACTTCCTCCGG |
| | | CCTGACTTTCGGAGGCGGCACGAAGCTCGAAATCAAG |
| BCMA_EBB- | 180 | EVQLVETGGGLVQPGGSLRLSCAASGITFSRYPMSWVRQAPGKGLEWVS |
| C1978-G1- | | GISDSGVSTYYADSAKGRFTISRDNSKNTLFLQMSSLRDEDTAVYYCVT |
| aa | | RAGSEASDIWGQGTMVTVSS |
| VH | | |
| BCMA_EBB- | 201 | EIVLTQSPATLSLSPGERATLSCRASQSVSNSLAWYQQKPGQAPRLLIY |
| C1978-G1- | | DASSRATGIPDRFSGSGSGTDFTLTISRLEPEDFAIYYCQQFGTSSGLT |
| aa | | FGGGTKLEIK |
| VL | | |
| BCMA_EBB- | 222 | MALPVTALLLPLALLLHAARPEVQLVETGGGLVQPGGSLRLSCAA |
| C1978-G1- | | SGITFSRYPMSWVRQAPGKGLEWVSGISDSGVSTYYADSAKGRFTI |
| aa | | SRDNSKNTLFLQMSSLRDEDTAVYYCVTRAGSEASDIWGQGTMV |
| Full CART | | TVSSGGGGSGGGGSGGGGSEIVLTQSPATLSLSPGERATLSCRASQ |
| | | SVSNSLAWYQQKPGQAPRLLIYDASSRATGIPDRFSGSGSGTDFTL |
| | | TISRLEPEDFAIYYCQQFGTSSGLTFGGGTKLEIKTTTPAPRPPTPAP |
| | | TIASQPLSLRPEACRPAAGGAVHTRGLDFACDIYIWAPLAGTCGVL |
| | | LLSLVITLYCKRGRKKLLYIFKQPFMRPVQTTQEEDGCSCRFPEEEE |
| | | GGCELRVKFSRSADAPAYKQGQNQLYNELNLGRREEYDVLDKRR |
| | | GRDPEMGGKPRRKNPQEGLYNELQKDKMAEAYSEIGMKGERRRG |
| | | KGHDGLYQGLSTATKDTYDALHMQALPPR |
| BCMA_EBB- | 243 | ATGGCCCTCCCTGTCACCGCCCTGCTGCTTCCGCTGGCTCTTCTGCTCC |
| C1978-G1- | | ACGCCGCTCGGCCCGAAGTGCAACTGGTGGAAACCGGTGGCGGCCTGGT |
| nt | | GCAGCCTGGAGGATCATTGAGGCTGTCATGCGCGGCCAGCGGTATTACC |
| Full CART | | TTCTCCCGGTACCCCATGTCCTGGGTCAGACAGGCCCCGGGGAAAGGGC |
| | | TTGAATGGGTGTCCGGGATCTCGGACTCCGGTGTCAGCACTTACTACGC |
| | | CGACTCCGCCAAGGGACGCTTCACCATTTCCCGGGACAACTCGAAGAAC |
| | | ACCCTGTTCCTCCAAATGAGCTCCCTCCGGGACGAGGATACTGCAGTGT |
| | | ACTACTGCGTGACCCGCGCCGGGTCCGAGGCGTCTGACATTTGGGGACA |
| | | GGGCACTATGGTCACCGTGTCGTCCGGCGGAGGGGGCTCGGGAGGCGGT |
| | | GGCAGCGGAGGAGGAGGGTCCGAGATCGTGCTGACCCAATCCCCGGCCA |
| | | CCCTCTCGCTGAGCCCTGGAGAAAGGGCAACCTTGTCCTGTCGCGCGAG |
| | | CCAGTCCGTGAGCAACTCCCTGGCCTGGTACCAGCAGAAGCCCGGACAG |
| | | GCTCCGAGACTTCTGATCTACGACGCTTCGAGCCGGGCCACTGGAATCC |
| | | CCGACCGCTTTTCGGGGTCCGGCTCAGGAACCGATTTCACCCTGACAAT |
| | | CTCACGGCTGGAGCCAGAGGATTTCGCCATCTATTACTGCCAGCAGTTC |
| | | GGTACTTCCTCCGGCCTGACTTTCGGAGGCGGCACGAAGCTCGAAATCA |
| | | AGACCACTACCCCAGCACCGAGGCCACCCACCCCGGCTCCTACCATCGC |
| | | CTCCCAGCCTCTGTCCCTGCGTCCGGAGGCATGTAGACCCGCAGCTGGT |
| | | GGGGCCGTGCATACCCGGGGTCTTGACTTCGCCTGCGATATCTACATTT |
| | | GGGCCCCTCTGGCTGGTACTTGCGGGGTCCTGCTGCTTTCACTCGTGAT |
| | | CACTCTTTACTGTAAGCGCGGTCGGAAGAAGCTGCTGTACATCTTTAAG |
| | | CAACCCTTCATGAGGCCTGTGCAGACTACTCAAGAGGAGGACGGCTGTT |
| | | CATGCCGGTTCCCAGAGGAGGAGGAAGGCGGCTGCGAACTGCGCGTGAA |
| | | ATTCAGCCGCAGCGCAGATGCTCCAGCCTACAAGCAGGGGCAGAACCAG |
| | | CTCTACAACGAACTCAATCTTGGTCGGAGAGAGGAGTACGACGTGCTGG |
| | | ACAAGCGGAGAGGACGGGACCCAGAAATGGGCGGGAAGCCGCGCAGAAA |
| | | GAATCCCCAAGAGGGCCTGTACAACGAGCTCCAAAAGGATAAGATGGCA |
| | | GAAGCCTATAGCGAGATTGGTATGAAAGGGGAACGCAGAAGAGGCAAAG |
| | | GCCACGACGGACTGTACCAGGGACTCAGCACCGCCACCAAGGACACCTA |
| | | TGACGCTCTTCACATGCAGGCCCTGCCGCCTCGG |

BCMA_EBB-C1979-C1

| | | |
|---|---|---|
| BCMA_EBB- | 139 | QVQLVESGGGLVQPGGSLRLSCAASGFTFSSYAMSWVRQAPGKGLEWVS |
| C1979-C1- | | AISGSGGSTYYADSVKGRFTISRDNAKNSLYLQMNSLRAEDTAIYYCAR |
| aa | | ATYKRELRYYYGMDVWGQGTMVTVSSGGGGSGGGGSGGGGSEIVMTQSP |
| ScFv domain | | GTVSLSPGERATLSCRASQSVSSSFLAWYQQKPGQAPRLLIYGASSRAT |
| | | GIPDRFSGSGSGTDFTLTISRLEPEDSAVYYCQQYHSSPSWTFGQGTRL |
| | | EIK |
| BCMA_EBB- | 160 | CAAGTGCAGCTCGTGGAATCGGGTGGCGGACTGGTGCAGCCGGGGGGCT |
| C1979-C1-nt | | CACTTAGACTGTCCTGCGCGGCCAGCGGATTCACTTTCTCCTCCTACGC |
| ScFv domain | | CATGTCCTGGGTCAGACAGGCCCCTGGAAAGGGCCTGGAATGGGTGTCC |
| | | GCAATCAGCGGCAGCGGCGGCTCGACCTATTACGCGGATTCAGTGAAGG |
| | | GCAGATTCACCATTTCCCGGGACAACGCCAAGAACTCCTTGTACCTTCA |
| | | AATGAACTCCCTCCGCGCGGAAGATACCGCAATCTACTACTGCGCTCGG |
| | | GCCACTTACAAGAGGGAACTGCGCTACTACTACGGGATGGACGTCTGGG |
| | | GCCAGGGAACCATGGTCACCGTGTCCAGCGGAGGAGGAGGATCGGGAGG |
| | | AGGCGGTAGCGGGGGTGGAGGGTCGGAGATCGTGATGACCCAGTCCCCC |
| | | GGCACTGTGTCGCTGTCCCCCGGCGAACGGGCCACCCTGTCATGTCGGG |
| | | CCAGCCAGTCAGTGTCGTCAAGCTTCCTCGCCTGGTACCAGCAGAAACC |
| | | GGGACAAGCTCCCCGCCTGCTGATCTACGGAGCCAGCAGCCGGGCCACC |
| | | GGTATTCCTGACCGGTTCTCCGGTTCGGGGTCCGGGACCGACTTTACTC |
| | | TGACTATCTCTCGCCTCGAGCCAGAGGACTCCGCCGTGTATTACTGCCA |
| | | GCAGTACCACTCCTCCCCGTCCTGGACGTTCGGACAGGGCACAAGGCTG |
| | | GAGATTAAG |
| BCMA_EBB- | 181 | QVQLVESGGGLVQPGGSLRLSCAASGFTFSSYAMSWVRQAPGKGLEWVS |
| C1979-C1- | | AISGSGGSTYYADSVKGRFTISRDNAKNSLYLQMNSLRAEDTAIYYCAR |
| aa | | ATYKRELRYYYGMDVWGQGTMVTVSS |
| VH | | |
| BCMA_EBB- | 202 | EIVMTQSPGTVSLSPGERATLSCRASQSVSSSFLAWYQQKPGQAPRLLI |
| C1979-C1- | | YGASSRATGIPDRFSGSGSGTDFTLTISRLEPEDSAVYYCQQYHSSPSW |
| aa | | TFGQGTRLEIK |
| VL | | |
| BCMA_EBB- | 223 | MALPVTALLLPLALLLHAARPQVQLVESGGGLVQPGGSLRLSCAASGFT |
| C1979-C1- | | FSSYAMSWVRQAPGKGLEWVSAISGSGGSTYYADSVKGRFTISRDNAKN |
| aa | | SLYLQMNSLRAEDTAIYYCARATYKRELRYYYGMDVWGQGTMVTVSSGG |
| Full CART | | GGSGGGGSGGGGSEIVMTQSPGTVSLSPGERATLSCRASQSVSSSFLAW |
| | | YQQKPGQAPRLLIYGASSRATGIPDRFSGSGSGTDFTLTISRLEPEDSA |
| | | VYYCQQYHSSPSWTFGQGTRLEIKTTTPAPRPPTPAPTIASQPLSLRPE |
| | | ACRPAAGGAVHTRGLDFACDIYIWAPLAGTCGVLLLSLVITLYCKRGRK |
| | | KLLYIFKQPFMRPVQTTQEEDGCSCRFPEEEEGGCELRVKFSRSADAPA |
| | | YKQGQNQLYNELNLGRREEYDVLDKRRGRDPEMGGKPRRKNPQEGLYNE |
| | | LQKDKMAEAYSEIGMKGERRRGKGHDGLYQGLSTATKDTYDALHMQALP |
| | | PR |
| BCMA_EBB- | 244 | ATGGCCCTCCCTGTCACCGCCCTGCTGCTTCCGCTGGCTCTTCTGCTCC |
| C1979-C1-nt | | ACGCCGCTCGGCCCCAAGTGCAGCTCGTGGAATCGGGTGGCGGACTGGT |
| Full CART | | GCAGCCGGGGGGCTCACTTAGACTGTCCTGCGCGGCCAGCGGATTCACT |
| | | TTCTCCTCCTACGCCATGTCCTGGGTCAGACAGGCCCCTGGAAAGGGCC |
| | | TGGAATGGGTGTCCGCAATCAGCGGCAGCGGCGGCTCGACCTATTACGC |
| | | GGATTCAGTGAAGGGCAGATTCACCATTTCCCGGGACAACGCCAAGAAC |
| | | TCCTTGTACCTTCAAATGAACTCCCTCCGCGCGGAAGATACCGCAATCT |
| | | ACTACTGCGCTCGGGCCACTTACAAGAGGGAACTGCGCTACTACTACGG |
| | | GATGGACGTCTGGGGCCAGGGAACCATGGTCACCGTGTCCAGCGGAGGA |
| | | GGAGGATCGGGAGGAGGCGGTAGCGGGGGTGGAGGGTCGGAGATCGTGA |
| | | TGACCCAGTCCCCCGGCACTGTGTCGCTGTCCCCCGGCGAACGGGCCAC |
| | | CCTGTCATGTCGGGCCAGCCAGTCAGTGTCGTCAAGCTTCCTCGCCTGG |
| | | TACCAGCAGAAACCGGGACAAGCTCCCCGCCTGCTGATCTACGGAGCCA |
| | | GCAGCCGGGCCACCGGTATTCCTGACCGGTTCTCCGGTTCGGGGTCCGG |
| | | GACCGACTTTACTCTGACTATCTCTCGCCTCGAGCCAGAGGACTCCGCC |
| | | GTGTATTACTGCCAGCAGTACCACTCCTCCCCGTCCTGGACGTTCGGAC |
| | | AGGGCACAAGGCTGGAGATTAAGACCACTACCCCAGCACCGAGGCCACC |
| | | CACCCCGGCTCCTACCATCGCCTCCCAGCCTCTGTCCCTGCGTCCGGAG |
| | | GCATGTAGACCCGCAGCTGGTGGGGCCGTGCATACCCGGGGTCTTGACT |
| | | TCGCCTGCGATATCTACATTTGGGCCCCTCTGGCTGGTACTTGCGGGGT |
| | | CCTGCTGCTTTCACTCGTGATCACTCTTTACTGTAAGCGCGGTCGGAAG |
| | | AAGCTGCTGTACATCTTTAAGCAACCCTTCATGAGGCCTGTGCAGACTA |
| | | CTCAAGAGGAGGACGGCTGTTCATGCCGGTTCCCAGAGGAGGAGGAAGG |
| | | CGGCTGCGAACTGCGCGTGAAATTCAGCCGCAGCGCAGATGCTCCAGCC |
| | | TACAAGCAGGGGCAGAACCAGCTCTACAACGAACTCAATCTTGGTCGGA |
| | | GAGAGGAGTACGACGTGCTGGACAAGCGGAGAGGACGGGACCCAGAAAT |
| | | GGGCGGGAAGCCGCGCAGAAAGAATCCCCAAGAGGGCCTGTACAACGAG |
| | | CTCCAAAAGGATAAGATGGCAGAAGCCTATAGCGAGATTGGTATGAAAG |
| | | GGGAACGCAGAAGAGGCAAAGGCCACGACGGACTGTACCAGGGACTCAG |
| | | CACCGCCACCAAGGACACCTATGACGCTCTTCACATGCAGGCCCTGCCG |
| | | CCTCGG |

BCMA_EBB-C1978-C7

| | | |
|---|---|---|
| BCMA_EBB- | 140 | EVQLVETGGGLVQPGGSLRLSCAASGFTFSSYAMSWVRQAPGKGLEWVS |
| C1978-C7- | | AISGSGGSTYYADSVKGRFTISRDNSKNTLYLQMNTLKAEDTAVYYCAR |
| aa | | ATYKRELRYYYGMDVWGQGTTVTVSSGGGGSGGGGSGGGGSEIVLTQSP |
| ScFv domain | | STLSLSPGESATLSCRASQSVSTTFLAWYQQKPGQAPRLLIYGSSNRAT |
| | | GIPDRFSGSGSGTDFTLTIRRLEPEDFAVYYCQQYHSSPSWTFGQGTKV |
| | | EIK |
| BCMA_EBB- | 161 | GAGGTGCAGCTTGTGGAAACCGGTGGCGGACTGGTGCAGCCCGGAGGAA |
| C1978-C7-nt | | GCCTCAGGCTGTCCTGCGCCGCGTCCGGCTTCACCTTCTCCTCGTACGC |
| ScFv domain | | CATGTCCTGGGTCCGCCAGGCCCCCGGAAAGGGCCTGGAATGGGTGTCC |
| | | GCCATCTCTGGAAGCGGAGGTTCCACGTACTACGCGGACAGCGTCAAGG |
| | | GAAGGTTCACAATCTCCCGCGATAATTCGAAGAACACTCTGTACCTTCA |
| | | AATGAACACCCTGAAGGCCGAGGACACTGCTGTGTACTACTGCGCACGG |
| | | GCCACCTACAAGAGAGAGCTCCGGTACTACTACGGAATGGACGTCTGGG |
| | | GCCAGGGAACTACTGTGACCGTGTCCTCGGGAGGGGGTGGCTCCGGGGG |
| | | GGGCGGCTCCGGCGGAGGCGGTTCCGAGATTGTGCTGACCCAGTCACCT |
| | | TCAACTCTGTCGCTGTCCCCGGGAGAGAGCGCTACTCTGAGCTGCCGGG |
| | | CCAGCCAGTCCGTGTCCACCACCTTCCTCGCCTGGTATCAGCAGAAGCC |
| | | GGGGCAGGCACCACGGCTCTTGATCTACGGGTCAAGCAACAGAGCGACC |
| | | GGAATTCCTGACCGCTTCTCGGGGAGCGGTTCAGGCACCGACTTCACCC |
| | | TGACTATCCGGCGCCTGGAACCCGAAGATTTCGCCGTGTATTACTGTCA |
| | | ACAGTACCACTCCTCGCCGTCCTGGACCTTTGGCCAAGGAACCAAAGTG |
| | | GAAATCAAG |
| BCMA_EBB- | 182 | EVQLVETGGGLVQPGGSLRLSCAASGFTFSSYAMSWVRQAPGKGLEWVS |
| C1978-C7- | | AISGSGGSTYYADSVKGRFTISRDNSKNTLYLQMNTLKAEDTAVYYCAR |
| aa | | ATYKRELRYYYGMDVWGQGTTVTVSS |
| VH | | |
| BCMA_EBB- | 203 | EIVLTQSPSTLSLSPGESATLSCRASQSVSTTFLAWYQQKPGQAPRLLI |
| C1978-C7- | | YGSSNRATGIPDRFSGSGSGTDFTLTIRRLEPEDFAVYYCQQYHSSPSW |
| aa | | TFGQGTKVEIK |
| VL | | |
| BCMA_EBB- | 224 | MALPVTALLLPLALLLHAARPEVQLVETGGGLVQPGGSLRLSCAASGFT |
| C1978-C7- | | FSSYAMSWVRQAPGKGLEWVSAISGSGGSTYYADSVKGRFTISRDNSKN |
| aa | | TLYLQMNTLKAEDTAVYYCARATYKRELRYYYGMDVWGQGTTVTVSSGG |
| Full CART | | GGSGGGGSGGGGSEIVLTQSPSTLSLSPGESATLSCRASQSVSTTFLAW |
| | | YQQKPGQAPRLLIYGSSNRATGIPDRFSGSGSGTDFTLTIRRLEPEDFA |
| | | VYYCQQYHSSPSWTFGQGTKVEIKTTTPAPRPPTPAPTIASQPLSLRPE |
| | | ACRPAAGGAVHTRGLDFACDIYIWAPLAGTCGVLLLSLVITLYCKRGRK |
| | | KLLYIFKQPFMRPVQTTQEEDGCSCRFPEEEEGGCELRVKFSRSADAPA |
| | | YKQGQNQLYNELNLGRREEYDVLDKRRGRDPEMGGKPRRKNPQEGLYNE |
| | | LQKDKMAEAYSEIGMKGERRRGKGHDGLYQGLSTATKDTYDALHMQALP |
| | | PR |
| BCMA_EBB- | 245 | ATGGCCCTCCCTGTCACCGCCCTGCTGCTTCCGCTGGCTCTTCTGCTCC |
| C1978-C7-nt | | ACGCCGCTCGGCCCGAGGTGCAGCTTGTGGAAACCGGTGGCGGACTGGT |
| Full CART | | GCAGCCCGGAGGAAGCCTCAGGCTGTCCTGCGCCGCGTCCGGCTTCACC |
| | | TTCTCCTCGTACGCCATGTCCTGGGTCCGCCAGGCCCCCGGAAAGGGCC |
| | | TGGAATGGGTGTCCGCCATCTCTGGAAGCGGAGGTTCCACGTACTACGC |
| | | GGACAGCGTCAAGGGAAGGTTCACAATCTCCCGCGATAATTCGAAGAAC |
| | | ACTCTGTACCTTCAAATGAACACCCTGAAGGCCGAGGACACTGCTGTGT |
| | | ACTACTGCGCACGGGCCACCTACAAGAGAGAGCTCCGGTACTACTACGG |
| | | AATGGACGTCTGGGGCCAGGGAACTACTGTGACCGTGTCCTCGGGAGGG |
| | | GGTGGCTCCGGGGGGGGCGGCTCCGGCGGAGGCGGTTCCGAGATTGTGC |
| | | TGACCCAGTCACCTTCAACTCTGTCGCTGTCCCCGGGAGAGAGCGCTAC |
| | | TCTGAGCTGCCGGGCCAGCCAGTCCGTGTCCACCACCTTCCTCGCCTGG |
| | | TATCAGCAGAAGCCGGGGCAGGCACCACGGCTCTTGATCTACGGGTCAA |
| | | GCAACAGAGCGACCGGAATTCCTGACCGCTTCTCGGGGAGCGGTTCAGG |
| | | CACCGACTTCACCCTGACTATCCGGCGCCTGGAACCCGAAGATTTCGCC |
| | | GTGTATTACTGTCAACAGTACCACTCCTCGCCGTCCTGGACCTTTGGCC |
| | | AAGGAACCAAAGTGGAAATCAAGACCACTACCCCAGCACCGAGGCCACC |
| | | CACCCCGGCTCCTACCATCGCCTCCCAGCCTCTGTCCCTGCGTCCGGAG |
| | | GCATGTAGACCCGCAGCTGGTGGGGCCGTGCATACCCGGGGTCTTGACT |
| | | TCGCCTGCGATATCTACATTTGGGCCCCTCTGGCTGGTACTTGCGGGGT |
| | | CCTGCTGCTTTCACTCGTGATCACTCTTTACTGTAAGCGCGGTCGGAAG |
| | | AAGCTGCTGTACATCTTTAAGCAACCCTTCATGAGGCCTGTGCAGACTA |
| | | CTCAAGAGGAGGACGGCTGTTCATGCCGGTTCCCAGAGGAGGAGGAAGG |
| | | CGGCTGCGAACTGCGCGTGAAATTCAGCCGCAGCGCAGATGCTCCAGCC |
| | | TACAAGCAGGGGCAGAACCAGCTCTACAACGAACTCAATCTTGGTCGGA |
| | | GAGAGGAGTACGACGTGCTGGACAAGCGGAGAGGACGGGACCCAGAAAT |
| | | GGGCGGGAAGCCGCGCAGAAAGAATCCCCAAGAGGGCCTGTACAACGAG |
| | | CTCCAAAAGGATAAGATGGCAGAAGCCTATAGCGAGATTGGTATGAAAG |
| | | GGGAACGCAGAAGAGGCAAAGGCCACGACGGACTGTACCAGGGACTCAG |
| | | CACCGCCACCAAGGACACCTATGACGCTCTTCACATGCAGGCCCTGCCG |
| | | CCTCGG |

BCMA_EBB-C1978-D10

| | | |
|---|---|---|
| BCMA_EBB- | 141 | EVQLVETGGGLVQPGRSLRLSCAASGFTFDDYAMHWVRQAPGKGLEWVS |
| C1978-D10- | | GISWNSGSIGYADSVKGRFTISRDNAKNSLYLQMNSLRDEDTAVYYCAR |
| aa | | VGKAVPDVWGQGTTVTVSSGGGGSGGGGSGGGGSDIVMTQTPSSLSASV |
| ScFv domain | | GDRVTITCRASQSISSYLNWYQQKPGKAPKLLIYAASSLQSGVPSRFSG |
| | | SGSGTDFTLTISSLQPEDFATYYCQQSYSTPYSFGQGTRLEIK |
| BCMA_EBB- | 162 | GAAGTGCAGCTCGTGGAAACTGGAGGTGGACTCGTGCAGCCTGGACGGT |
| C1978-D10- | | CGCTGCGGCTGAGCTGCGCTGCATCCGGCTTCACCTTCGACGATTATGC |
| nt | | CATGCACTGGGTCAGACAGGCGCCAGGGAAGGGACTTGAGTGGGTGTCC |
| ScFv domain | | GGTATCAGCTGGAATAGCGGCTCAATCGGATACGCGGACTCCGTGAAGG |
| | | GAAGGTTCACCATTTCCCGCGACAACGCCAAGAACTCCCTGTACTTGCA |
| | | AATGAACAGCCTCCGGGATGAGGACACTGCCGTGTACTACTGCGCCCGC |
| | | GTCGGAAAAGCTGTGCCCGACGTCTGGGGCCAGGGAACCACTGTGACCG |
| | | TGTCCAGCGGCGGGGGTGGATCGGGCGGTGGAGGGTCCGGTGGAGGGGG |
| | | CTCAGATATTGTGATGACCCAGACCCCCTCGTCCCTGTCCGCCTCGGTC |
| | | GGCGACCGCGTGACTATCACATGTAGAGCCTCGCAGAGCATCTCCAGCT |
| | | ACCTGAACTGGTATCAGCAGAAGCCGGGGAAGGCCCCGAAGCTCCTGAT |
| | | CTACGCGGCATCATCACTGCAATCGGGAGTGCCGAGCCGGTTTTCCGGG |
| | | TCCGGCTCCGGCACCGACTTCACGCTGACCATTTCTTCCCTGCAACCCG |
| | | AGGACTTCGCCACTTACTACTGCCAGCAGTCCTACTCCACCCCTTACTC |
| | | CTTCGGCCAAGGAACCAGGCTGGAAATCAAG |
| BCMA_EBB- | 183 | EVQLVETGGGLVQPGRSLRLSCAASGFTFDDYAMHWVRQAPGKGLEWVS |
| C1978-D10- | | GISWNSGSIGYADSVKGRFTISRDNAKNSLYLQMNSLRDEDTAVYYCAR |
| aa | | VGKAVPDVWGQGTTVTVSS |
| VH | | |
| BCMA_EBB- | 204 | DIVMTQTPSSLSASVGDRVTITCRASQSISSYLNWYQQKPGKAPKLLIY |
| C1978-D10- | | AASSLQSGVPSRFSGSGSGTDFTLTISSLQPEDFATYYCQQSYSTPYSF |
| aa | | GQGTRLEIK |
| VL | | |
| BCMA_EBB- | 225 | MALPVTALLLPLALLLHAARPEVQLVETGGGLVQPGRSLRLSCAASGFT |
| C1978-D10- | | FDDYAMHWVRQAPGKGLEWVSGISWNSGSIGYADSVKGRFTISRDNAKN |
| aa | | SLYLQMNSLRDEDTAVYYCARVGKAVPDVWGQGTTVTVSSGGGGSGGGG |
| Full CART | | SGGGGSDIVMTQTPSSLSASVGDRVTITCRASQSISSYLNWYQQKPGKA |
| | | PKLLIYAASSLQSGVPSRFSGSGSGTDFTLTISSLQPEDFATYYCQQSY |
| | | STPYSFGQGTRLEIKTTTPAPRPPTPAPTIASQPLSLRPEACRPAAGGA |
| | | VHTRGLDFACDIYIWAPLAGTCGVLLLSLVITLYCKRGRKKLLYIFKQP |
| | | FMRPVQTTQEEDGCSCRFPEEEEGGCELRVKFSRSADAPAYKQGQNQLY |
| | | NELNLGRREEYDVLDKRRGRDPEMGGKPRRKNPQEGLYNELQKDKMAEA |
| | | YSEIGMKGERRRGKGHDGLYQGLSTATKDTYDALHMQALPPR |
| BCMA_EBB- | 246 | ATGGCCCTCCCTGTCACCGCCCTGCTGCTTCCGCTGGCTCTTCTGCTCC |
| C1978-D10- | | ACGCCGCTCGGCCCGAAGTGCAGCTCGTGGAAACTGGAGGTGGACTCGT |
| nt | | GCAGCCTGGACGGTCGCTGCGGCTGAGCTGCGCTGCATCCGGCTTCACC |
| Full CART | | TTCGACGATTATGCCATGCACTGGGTCAGACAGGCGCCAGGGAAGGGAC |
| | | TTGAGTGGGTGTCCGGTATCAGCTGGAATAGCGGCTCAATCGGATACGC |
| | | GGACTCCGTGAAGGGAAGGTTCACCATTTCCCGCGACAACGCCAAGAAC |
| | | TCCCTGTACTTGCAAATGAACAGCCTCCGGGATGAGGACACTGCCGTGT |
| | | ACTACTGCGCCCGCGTCGGAAAAGCTGTGCCCGACGTCTGGGGCCAGGG |
| | | AACCACTGTGACCGTGTCCAGCGGCGGGGGTGGATCGGGCGGTGGAGGG |
| | | TCCGGTGGAGGGGGCTCAGATATTGTGATGACCCAGACCCCCTCGTCCC |
| | | TGTCCGCCTCGGTCGGCGACCGCGTGACTATCACATGTAGAGCCTCGCA |
| | | GAGCATCTCCAGCTACCTGAACTGGTATCAGCAGAAGCCGGGGAAGGCC |
| | | CCGAAGCTCCTGATCTACGCGGCATCATCACTGCAATCGGGAGTGCCGA |
| | | GCCGGTTTTCCGGGTCCGGCTCCGGCACCGACTTCACGCTGACCATTTC |
| | | TTCCCTGCAACCCGAGGACTTCGCCACTTACTACTGCCAGCAGTCCTAC |
| | | TCCACCCCTTACTCCTTCGGCCAAGGAACCAGGCTGGAAATCAAGACCA |
| | | CTACCCCAGCACCGAGGCCACCCACCCCGGCTCCTACCATCGCCTCCCA |
| | | GCCTCTGTCCCTGCGTCCGGAGGCATGTAGACCCGCAGCTGGTGGGGCC |
| | | GTGCATACCCGGGGTCTTGACTTCGCCTGCGATATCTACATTTGGGCCC |
| | | CTCTGGCTGGTACTTGCGGGGTCCTGCTGCTTTCACTCGTGATCACTCT |
| | | TTACTGTAAGCGCGGTCGGAAGAAGCTGCTGTACATCTTTAAGCAACCC |
| | | TTCATGAGGCCTGTGCAGACTACTCAAGAGGAGGACGGCTGTTCATGCC |
| | | GGTTCCCAGAGGAGGAGGAAGGCGGCTGCGAACTGCGCGTGAAATTCAG |
| | | CCGCAGCGCAGATGCTCCAGCCTACAAGCAGGGGCAGAACCAGCTCTAC |
| | | AACGAACTCAATCTTGGTCGGAGAGAGGAGTACGACGTGCTGGACAAGC |
| | | GGAGAGGACGGGACCCAGAAATGGGCGGGAAGCCGCGCAGAAAGAATCC |
| | | CCAAGAGGGCCTGTACAACGAGCTCCAAAAGGATAAGATGGCAGAAGCC |
| | | TATAGCGAGATTGGTATGAAAGGGGAACGCAGAAGAGGCAAAGGCCACG |
| | | ACGGACTGTACCAGGGACTCAGCACCGCCACCAAGGACACCTATGACGC |
| | | TCTTCACATGCAGGCCCTGCCGCCTCGG |

BCMA_EBB-C1979-C12

| | | |
|---|---|---|
| BCMA_EBB- | 142 | EVQLVESGGGLVQPGRSLRLSCTASGFTFDDYAMHWVRQRPGKGLEWVA |
| C1979-C12- | | SINWKGNSLAYGDSVKGRFAISRDNAKNTVFLQMNSLRTEDTAVYYCAS |
| aa | | HQGVAYYNYAMDVWGRGTLVTVSSGGGGSGGGGSGGGGSEIVLTQSPGT |
| ScFv domain | | LSLSPGERATLSCRATQSIGSSFLAWYQQRPGQAPRLLIYGASQRATGI |
| | | PDRFSGRGSGTDFTLTISRVEPEDSAVYYCQHYESSPSWTFGQGTKVEI |
| | | K |
| BCMA_EBB- | 163 | GAAGTGCAGCTCGTGGAGAGCGGGGGAGGATTGGTGCAGCCCGGAAGGT |
| C1979-C12- | | CCCTGCGGCTCTCCTGCACTGCGTCTGGCTTCACCTTCGACGACTACGC |
| nt | | GATGCACTGGGTCAGACAGCGCCCGGGAAAGGGCCTGGAATGGGTCGCC |
| ScFv domain | | TCAATCAACTGGAAGGGAAACTCCCTGGCCTATGGCGACAGCGTGAAGG |
| | | GCCGCTTCGCCATTTCGCGCGACAACGCCAAGAACACCGTGTTTCTGCA |
| | | AATGAATTCCCTGCGGACCGAGGATACCGCTGTGTACTACTGCGCCAGC |
| | | CACCAGGGCGTGGCATACTATAACTACGCCATGGACGTGTGGGGAAGAG |
| | | GGACGCTCGTCACCGTGTCCTCCGGGGGCGGTGGATCGGGTGGAGGAGG |
| | | AAGCGGTGGCGGGGGCAGCGAAATCGTGCTGACTCAGAGCCCGGGAACT |
| | | CTTTCACTGTCCCCGGGAGAACGGGCCACTCTCTCGTGCCGGGCCACCC |
| | | AGTCCATCGGCTCCTCCTTCCTTGCCTGGTACCAGCAGAGGCCAGGACA |
| | | GGCGCCCCGCCTGCTGATCTACGGTGCTTCCCAACGCGCCACTGGCATT |
| | | CCTGACCGGTTCAGCGGCAGAGGGTCGGGAACCGATTTCACACTGACCA |
| | | TTTCCCGGGTGGAGCCCGAAGATTCGGCAGTCTACTACTGTCAGCATTA |
| | | CGAGTCCTCCCCTTCATGGACCTTCGGTCAAGGGACCAAAGTGGAGATC |
| | | AAG |
| BCMA_EBB- | 184 | EVQLVESGGGLVQPGRSLRLSCTASGFTFDDYAMHWVRQRPGKGLEWVA |
| C1979-C12- | | SINWKGNSLAYGDSVKGRFAISRDNAKNTVFLQMNSLRTEDTAVYYCAS |
| aa | | HQGVAYYNYAMDVWGRGTLVTVSS |
| VH | | |
| BCMA_EBB- | 205 | EIVLTQSPGTLSLSPGERATLSCRATQSIGSSFLAWYQQRPGQAPRLLI |
| C1979-C12- | | YGASQRATGIPDRFSGRGSGTDFTLTISRVEPEDSAVYYCQHYESSPSW |
| aa | | TFGQGTKVEIK |
| VL | | |
| BCMA_EBB- | 226 | MALPVTALLLPLALLLHAARPEVQLVESGGGLVQPGRSLRLSCTASGFT |
| C1979-C12- | | FDDYAMHWVRQRPGKGLEWVASINWKGNSLAYGDSVKGRFAISRDNAKN |
| aa | | TVFLQMNSLRTEDTAVYYCASHQGVAYYNYAMDVWGRGTLVTVSSGGGG |
| Full CART | | SGGGGSGGGGSEIVLTQSPGTLSLSPGERATLSCRATQSIGSSFLAWYQ |
| | | QRPGQAPRLLIYGASQRATGIPDRFSGRGSGTDFTLTISRVEPEDSAVY |
| | | YCQHYESSPSWTFGQGTKVEIKTTTPAPRPPTPAPTIASQPLSLRPEAC |
| | | RPAAGGAVHTRGLDFACDIYIWAPLAGTCGVLLLSLVITLYCKRGRKKL |
| | | LYIFKQPFMRPVQTTQEEDGCSCRFPEEEEGGCELRVKFSRSADAPAYK |
| | | QGQNQLYNELNLGRREEYDVLDKRRGRDPEMGGKPRRKNPQEGLYNELQ |
| | | KDKMAEAYSEIGMKGERRRGKGHDGLYQGLSTATKDTYDALHMQALPPR |
| BCMA_EBB- | 247 | ATGGCCCTCCCTGTCACCGCCCTGCTGCTTCCGCTGGCTCTTCTGCTCC |
| C1979-C12- | | ACGCCGCTCGGCCCGAAGTGCAGCTCGTGGAGAGCGGGGGAGGATTGGT |
| nt | | GCAGCCCGGAAGGTCCCTGCGGCTCTCCTGCACTGCGTCTGGCTTCACC |
| Full CART | | TTCGACGACTACGCGATGCACTGGGTCAGACAGCGCCCGGGAAAGGGCC |
| | | TGGAATGGGTCGCCTCAATCAACTGGAAGGGAAACTCCCTGGCCTATGG |
| | | CGACAGCGTGAAGGGCCGCTTCGCCATTTCGCGCGACAACGCCAAGAAC |
| | | ACCGTGTTTCTGCAAATGAATTCCCTGCGGACCGAGGATACCGCTGTGT |
| | | ACTACTGCGCCAGCCACCAGGGCGTGGCATACTATAACTACGCCATGGA |
| | | CGTGTGGGGAAGAGGGACGCTCGTCACCGTGTCCTCCGGGGGCGGTGGA |
| | | TCGGGTGGAGGAGGAAGCGGTGGCGGGGGCAGCGAAATCGTGCTGACTC |
| | | AGAGCCCGGGAACTCTTTCACTGTCCCCGGGAGAACGGGCCACTCTCTC |
| | | GTGCCGGGCCACCCAGTCCATCGGCTCCTCCTTCCTTGCCTGGTACCAG |
| | | CAGAGGCCAGGACAGGCGCCCCGCCTGCTGATCTACGGTGCTTCCCAAC |
| | | GCGCCACTGGCATTCCTGACCGGTTCAGCGGCAGAGGGTCGGGAACCGA |
| | | TTTCACACTGACCATTTCCCGGGTGGAGCCCGAAGATTCGGCAGTCTAC |
| | | TACTGTCAGCATTACGAGTCCTCCCCTTCATGGACCTTCGGTCAAGGGA |
| | | CCAAAGTGGAGATCAAGACCACTACCCCAGCACCGAGGCCACCCACCCC |
| | | GGCTCCTACCATCGCCTCCCAGCCTCTGTCCCTGCGTCCGGAGGCATGT |
| | | AGACCCGCAGCTGGTGGGGCCGTGCATACCCGGGGTCTTGACTTCGCCT |
| | | GCGATATCTACATTTGGGCCCCTCTGGCTGGTACTTGCGGGGTCCTGCT |
| | | GCTTTCACTCGTGATCACTCTTTACTGTAAGCGCGGTCGGAAGAAGCTG |
| | | CTGTACATCTTTAAGCAACCCTTCATGAGGCCTGTGCAGACTACTCAAG |
| | | AGGAGGACGGCTGTTCATGCCGGTTCCCAGAGGAGGAGGAAGGCGGCTG |
| | | CGAACTGCGCGTGAAATTCAGCCGCAGCGCAGATGCTCCAGCCTACAAG |
| | | CAGGGGCAGAACCAGCTCTACAACGAACTCAATCTTGGTCGGAGAGAGG |
| | | AGTACGACGTGCTGGACAAGCGGAGAGGACGGGACCCAGAAATGGGCGG |
| | | GAAGCCGCGCAGAAAGAATCCCCAAGAGGGCCTGTACAACGAGCTCCAA |
| | | AAGGATAAGATGGCAGAAGCCTATAGCGAGATTGGTATGAAAGGGGAAC |
| | | GCAGAAGAGGCAAAGGCCACGACGGACTGTACCAGGGACTCAGCACCGC |
| | | CACCAAGGACACCTATGACGCTCTTCACATGCAGGCCCTGCCGCCTCGG |

BCMA_EBB-C1980-G4

| | | |
|---|---|---|
| BCMA_EBB- | 143 | EVQLVESGGGLVQPGGSLRLSCAASGFTFSSYAMSWVRQAPGKGL |
| C1980-G4-aa | | EWVSAISGSGGSTYYADSVKGRFTISRDNSKNTLYLQMNSLRAED |
| ScFv domain | | TAVYYCAKVVRDGMDVWGQGTTVTVSSGGGGSGGGGSGGGGSE |
| | | IVLTQSPATLSLSPGERATLSCRASQSVSSSYLAWYQQKPGQAPRL |
| | | LIYGASSRATGIPDRFSGNGSGTDFTLTISRLEPEDFAVYYCQQYGS |
| | | PPRFTFGPGTKVDIK |
| BCMA_EBB- | 164 | GAGGTGCAGTTGGTCGAAAGCGGGGGCGGGCTTGTGCAGCCTGGCGGAT |
| C1980-G4-nt | | CACTGCGGCTGTCCTGCGCGGCATCAGGCTTCACGTTTTCTTCCTACGC |
| ScFv domain | | CATGTCCTGGGTGCGCCAGGCCCCTGGAAAGGGACTGGAATGGGTGTCC |
| | | GCGATTTCGGGGTCCGGCGGGAGCACCTACTACGCCGATTCCGTGAAGG |
| | | GCCGCTTCACTATCTCGCGGGACAACTCCAAGAACACCCTCTACCTCCA |
| | | AATGAATAGCCTGCGGGCCGAGGATACCGCCGTCTACTATTGCGCTAAG |
| | | GTCGTGCGCGACGGAATGGACGTGTGGGGACAGGGTACCACCGTGACAG |
| | | TGTCCTCGGGGGGAGGCGGTAGCGGCGGAGGAGGAAGCGGTGGTGGAGG |
| | | TTCCGAGATTGTGCTGACTCAATCACCCGCGACCCTGAGCCTGTCCCCC |
| | | GGCGAAAGGGCCACTCTGTCCTGTCGGGCCAGCCAATCAGTCTCCTCCT |
| | | CGTACCTGGCCTGGTACCAGCAGAAGCCAGGACAGGCTCCGAGACTCCT |
| | | TATCTATGGCGCATCCTCCCGCGCCACCGGAATCCCGGATAGGTTCTCG |
| | | GGAAACGGATCGGGGACCGACTTCACTCTCACCATCTCCCGGCTGGAAC |
| | | CGGAGGACTTCGCCGTGTACTACTGCCAGCAGTACGGCAGCCCGCCTAG |
| | | ATTCACTTTCGGCCCCGGCACCAAAGTGGACATCAAG |
| BCMA_EBB- | 185 | EVQLVESGGGLVQPGGSLRLSCAASGFTFSSYAMSWVRQAPGKGLEWVS |
| C1980-G4-aa | | AISGSGGSTYYADSVKGRFTISRDNSKNTLYLQMNSLRAEDTAVYYCAK |
| VH | | VVRDGMDVWGQGTTVTVSS |
| BCMA_EBB- | 206 | EIVLTQSPATLSLSPGERATLSCRASQSVSSSYLAWYQQKPGQAPRLLI |
| C1980-G4-aa | | YGASSRATGIPDRFSGNGSGTDFTLTISRLEPEDFAVYYCQQYGSPPRF |
| VL | | TFGPGTKVDIK |
| BCMA_EBB- | 227 | MALPVTALLLPLALLLHAARPEVQLVESGGGLVQPGGSLRLSCAA |
| C1980-G4-aa | | SGFTFSSYAMSWVRQAPGKGLEWVSAISGSGGSTYYADSVKGRFT |
| Full CART | | ISRDNSKNTLYLQMNSLRAEDTAVYYCAKVVRDGMDVWGQGTT |
| | | VTVSSGGGGSGGGGSGGGGSEIVLTQSPATLSLSPGERATLSCRAS |
| | | QSVSSSYLAWYQQKPGQAPRLLIYGASSRATGIPDRFSGNGSGTDF |
| | | TLTISRLEPEDFAVYYCQQYGSPPRFTFGPGTKVDIKTTTPAPRPPT |
| | | PAPTIASQPLSLRPEACRPAAGGAVHTRGLDFACDIYIWAPLAGTC |
| | | GVLLLSLVITLYCKRGRKKLLYIFKQPFMRPVQTTQEEDGCSCRFP |
| | | EEEEGGCELRVKFSRSADAPAYKQGQNQLYNELNLGRREEYDVL |
| | | DKRRGRDPEMGGKPRRKNPQEGLYNELQKDKMAEAYSEIGMKG |
| | | ERRRGKGHDGLYQGLSTATKDTYDALHMQALPPR |
| BCMA_EBB- | 248 | ATGGCCCTCCCTGTCACCGCCCTGCTGCTTCCGCTGGCTCTTCTGCTCC |
| C1980-G4-nt | | ACGCCGCTCGGCCCGAGGTGCAGTTGGTCGAAAGCGGGGGCGGGCTTGT |
| Full CART | | GCAGCCTGGCGGATCACTGCGGCTGTCCTGCGCGGCATCAGGCTTCACG |
| | | TTTTCTTCCTACGCCATGTCCTGGGTGCGCCAGGCCCCTGGAAAGGGAC |
| | | TGGAATGGGTGTCCGCGATTTCGGGGTCCGGCGGGAGCACCTACTACGC |
| | | CGATTCCGTGAAGGGCCGCTTCACTATCTCGCGGGACAACTCCAAGAAC |
| | | ACCCTCTACCTCCAAATGAATAGCCTGCGGGCCGAGGATACCGCCGTCT |
| | | ACTATTGCGCTAAGGTCGTGCGCGACGGAATGGACGTGTGGGGACAGGG |
| | | TACCACCGTGACAGTGTCCTCGGGGGGAGGCGGTAGCGGCGGAGGAGGA |
| | | AGCGGTGGTGGAGGTTCCGAGATTGTGCTGACTCAATCACCCGCGACCC |
| | | TGAGCCTGTCCCCCGGCGAAAGGGCCACTCTGTCCTGTCGGGCCAGCCA |
| | | ATCAGTCTCCTCCTCGTACCTGGCCTGGTACCAGCAGAAGCCAGGACAG |
| | | GCTCCGAGACTCCTTATCTATGGCGCATCCTCCCGCGCCACCGGAATCC |
| | | CGGATAGGTTCTCGGGAAACGGATCGGGGACCGACTTCACTCTCACCAT |
| | | CTCCCGGCTGGAACCGGAGGACTTCGCCGTGTACTACTGCCAGCAGTAC |
| | | GGCAGCCCGCCTAGATTCACTTTCGGCCCCGGCACCAAAGTGGACATCA |
| | | AGACCACTACCCCAGCACCGAGGCCACCCACCCCGGCTCCTACCATCGC |
| | | CTCCCAGCCTCTGTCCCTGCGTCCGGAGGCATGTAGACCCGCAGCTGGT |
| | | GGGGCCGTGCATACCCGGGGTCTTGACTTCGCCTGCGATATCTACATTT |
| | | GGGCCCCTCTGGCTGGTACTTGCGGGGTCCTGCTGCTTTCACTCGTGAT |
| | | CACTCTTTACTGTAAGCGCGGTCGGAAGAAGCTGCTGTACATCTTTAAG |
| | | CAACCCTTCATGAGGCCTGTGCAGACTACTCAAGAGGAGGACGGCTGTT |
| | | CATGCCGGTTCCCAGAGGAGGAGGAAGGCGGCTGCGAACTGCGCGTGAA |
| | | ATTCAGCCGCAGCGCAGATGCTCCAGCCTACAAGCAGGGGCAGAACCAG |
| | | CTCTACAACGAACTCAATCTTGGTCGGAGAGAGGAGTACGACGTGCTGG |
| | | ACAAGCGGAGAGGACGGGACCCAGAAATGGGCGGGAAGCCGCGCAGAAA |
| | | GAATCCCCAAGAGGGCCTGTACAACGAGCTCCAAAAGGATAAGATGGCA |
| | | GAAGCCTATAGCGAGATTGGTATGAAAGGGGAACGCAGAAGAGGCAAAG |
| | | GCCACGACGGACTGTACCAGGGACTCAGCACCGCCACCAAGGACACCTA |
| | | TGACGCTCTTCACATGCAGGCCCTGCCGCCTCGG |

BCMA_EBB-C1980-D2

| | | |
|---|---|---|
| BCMA_EBB- | 144 | EVQLLESGGGLVQPGGSLRLSCAASGFTFSSYAMSWVRQAPGKGLEWVS |
| C1980-D2-aa | | AISGSGGSTYYADSVKGRFTISRDNSKNTLYLQMNSLRAEDTAVYYCAK |
| ScFv domain | | IPQTGTFDYWGQGTLVTVSSGGGGSGGGGSGGGGSEIVLTQSPGTLSLS |
| | | PGERATLSCRASQSVSSSYLAWYQQRPGQAPRLLIYGASSRATGIPDRF |
| | | SGSGSGTDFTLTISRLEPEDFAVYYCQHYGSSPSWTFGQGTRLEIK |
| BCMA_EBB- | 165 | GAAGTGCAGCTGCTGGAGTCCGGCGGTGGATTGGTGCAACCGGGGGGAT |
| C1980-D2-nt | | CGCTCAGACTGTCCTGTGCGGCGTCAGGCTTCACCTTCTCGAGCTACGC |
| ScFv domain | | CATGTCATGGGTCAGACAGGCCCCTGGAAAGGGTCTGGAATGGGTGTCC |
| | | GCCATTTCCGGGAGCGGGGGATCTACATACTACGCCGATAGCGTGAAGG |
| | | GCCGCTTCACCATTTCCCGGGACAACTCCAAGAACACTCTCTATCTGCA |
| | | AATGAACTCCCTCCGCGCTGAGGACACTGCCGTGTACTACTGCGCCAAA |
| | | ATCCCTCAGACCGGCACCTTCGACTACTGGGGACAGGGGACTCTGGTCA |
| | | CCGTCAGCAGCGGTGGCGGAGGTTCGGGGGGAGGAGGAAGCGGCGGCGG |
| | | AGGGTCCGAGATTGTGCTGACCCAGTCACCCGGCACTTTGTCCCTGTCG |
| | | CCTGGAGAAAGGGCCACCCTTTCCTGCCGGGCATCCCAATCCGTGTCCT |
| | | CCTCGTACCTGGCCTGGTACCAGCAGAGGCCCGGACAGGCCCCACGGCT |
| | | TCTGATCTACGGAGCAAGCAGCCGCGCGACCGGTATCCCGGACCGGTTT |
| | | TCGGGCTCGGGCTCAGGAACTGACTTCACCCTCACCATCTCCCGCCTGG |
| | | AACCCGAAGATTTCGCTGTGTATTACTGCCAGCACTACGGCAGCTCCCC |
| | | GTCCTGGACGTTCGGCCAGGGAACTCGGCTGGAGATCAAG |
| BCMA_EBB- | 186 | EVQLLESGGGLVQPGGSLRLSCAASGFTFSSYAMSWVRQAPGKGLEWVS |
| C1980-D2-aa | | AISGSGGSTYYADSVKGRFTISRDNSKNTLYLQMNSLRAEDTAVYYCAK |
| VH | | IPQTGTFDYWGQGTLVTVSS |
| BCMA_EBB- | 207 | EIVLTQSPGTLSLSPGERATLSCRASQSVSSSYLAWYQQRPGQAPRLLI |
| C1980-D2-aa | | YGASSRATGIPDRFSGSGSGTDFTLTISRLEPEDFAVYYCQHYGSSPSW |
| VL | | TFGQGTRLEIK |
| BCMA_EBB- | 228 | MALPVTALLLPLALLLHAARPEVQLLESGGGLVQPGGSLRLSCAASGFT |
| C1980-D2-aa | | FSSYAMSWVRQAPGKGLEWVSAISGSGGSTYYADSVKGRFTISRDNSKN |
| Full CART | | TLYLQMNSLRAEDTAVYYCAKIPQTGTFDYWGQGTLVTVSSGGGGSGGG |
| | | GSGGGGSEIVLTQSPGTLSLSPGERATLSCRASQSVSSSYLAWYQQRPG |
| | | QAPRLLIYGASSRATGIPDRFSGSGSGTDFTLTISRLEPEDFAVYYCQH |
| | | YGSSPSWTFGQGTRLEIKTTTPAPRPPTPAPTIASQPLSLRPEACRPAA |
| | | GGAVHTRGLDFACDIYIWAPLAGTCGVLLLSLVITLYCKRGRKKLLYIF |
| | | KQPFMRPVQTTQEEDGCSCRFPEEEEGGCELRVKFSRSADAPAYKQGQN |
| | | QLYNELNLGRREEYDVLDKRRGRDPEMGGKPRRKNPQEGLYNELQKDKM |
| | | AEAYSEIGMKGERRRGKGHDGLYQGLSTATKDTYDALHMQALPPR |
| BCMA_EBB- | 249 | ATGGCCCTCCCTGTCACCGCCCTGCTGCTTCCGCTGGCTCTTCTGCTCC |
| C1980-D2-nt | | ACGCCGCTCGGCCCGAAGTGCAGCTGCTGGAGTCCGGCGGTGGATTGGT |
| Full CART | | GCAACCGGGGGGATCGCTCAGACTGTCCTGTGCGGCGTCAGGCTTCACC |
| | | TTCTCGAGCTACGCCATGTCATGGGTCAGACAGGCCCCTGGAAAGGGTC |
| | | TGGAATGGGTGTCCGCCATTTCCGGGAGCGGGGGATCTACATACTACGC |
| | | CGATAGCGTGAAGGGCCGCTTCACCATTTCCCGGGACAACTCCAAGAAC |
| | | ACTCTCTATCTGCAAATGAACTCCCTCCGCGCTGAGGACACTGCCGTGT |
| | | ACTACTGCGCCAAAATCCCTCAGACCGGCACCTTCGACTACTGGGGACA |
| | | GGGGACTCTGGTCACCGTCAGCAGCGGTGGCGGAGGTTCGGGGGGAGGA |
| | | GGAAGCGGCGGCGGAGGGTCCGAGATTGTGCTGACCCAGTCACCCGGCA |
| | | CTTTGTCCCTGTCGCCTGGAGAAAGGGCCACCCTTTCCTGCCGGGCATC |
| | | CCAATCCGTGTCCTCCTCGTACCTGGCCTGGTACCAGCAGAGGCCCGGA |
| | | CAGGCCCCACGGCTTCTGATCTACGGAGCAAGCAGCCGCGCGACCGGTA |
| | | TCCCGGACCGGTTTTCGGGCTCGGGCTCAGGAACTGACTTCACCCTCAC |
| | | CATCTCCCGCCTGGAACCCGAAGATTTCGCTGTGTATTACTGCCAGCAC |
| | | TACGGCAGCTCCCCGTCCTGGACGTTCGGCCAGGGAACTCGGCTGGAGA |
| | | TCAAGACCACTACCCCAGCACCGAGGCCACCCACCCCGGCTCCTACCAT |
| | | CGCCTCCCAGCCTCTGTCCCTGCGTCCGGAGGCATGTAGACCCGCAGCT |
| | | GGTGGGGCCGTGCATACCCGGGGTCTTGACTTCGCCTGCGATATCTACA |
| | | TTTGGGCCCCTCTGGCTGGTACTTGCGGGGTCCTGCTGCTTTCACTCGT |
| | | GATCACTCTTTACTGTAAGCGCGGTCGGAAGAAGCTGCTGTACATCTTT |
| | | AAGCAACCCTTCATGAGGCCTGTGCAGACTACTCAAGAGGAGGACGGCT |
| | | GTTCATGCCGGTTCCCAGAGGAGGAGGAAGGCGGCTGCGAACTGCGCGT |
| | | GAAATTCAGCCGCAGCGCAGATGCTCCAGCCTACAAGCAGGGGCAGAAC |
| | | CAGCTCTACAACGAACTCAATCTTGGTCGGAGAGAGGAGTACGACGTGC |
| | | TGGACAAGCGGAGAGGACGGGACCCAGAAATGGGCGGGAAGCCGCGCAG |
| | | AAAGAATCCCCAAGAGGGCCTGTACAACGAGCTCCAAAAGGATAAGATG |
| | | GCAGAAGCCTATAGCGAGATTGGTATGAAAGGGGAACGCAGAAGAGGCA |
| | | AAGGCCACGACGGACTGTACCAGGGACTCAGCACCGCCACCAAGGACAC |
| | | CTATGACGCTCTTCACATGCAGGCCCTGCCGCCTCGG |

BCMA_EBB-C1978-A10

| | | |
|---|---|---|
| BCMA_EBB- | 145 | EVQLVETGGGLVQPGGSLRLSCAASGFTFSSYAMSWVRQAPGKG |
| C1978-A10- | | LEWVSAISGSGGSTYYADSVKGRFTMSRENDKNSVFLQMNSLRVE |
| aa | | DTGVYYCARANYKRELRYYYGMDVWGQGTMVTVSSGGGGSGG |
| ScFv domain | | GGSGGGGSEIVMTQSPGTLSLSPGESATLSCRASQRVASNYLAWY |
| | | QHKPGQAPSLLISGASSRATGVPDRFSGSGSGTDFTLAISRLEPEDS |
| | | AVYYCQHYDSSPSWTFGQGTKVEIK |
| BCMA_EBB- | 166 | GAAGTGCAACTGGTGGAAACCGGTGGAGGACTCGTGCAGCCTGGCGGCA |
| C1978-A10- | | GCCTCCGGCTGAGCTGCGCCGCTTCGGGATTCACCTTTTCCTCCTACGC |
| nt | | GATGTCTTGGGTCAGACAGGCCCCCGGAAAGGGGCTGGAATGGGTGTCA |
| ScFv domain | | GCCATCTCCGGCTCCGGCGGATCAACGTACTACGCCGACTCCGTGAAAG |
| | | GCCGGTTCACCATGTCGCGCGAGAATGACAAGAACTCCGTGTTCCTGCA |
| | | AATGAACTCCCTGAGGGTGGAGGACACCGGAGTGTACTATTGTGCGCGC |
| | | GCCAACTACAAGAGAGAGCTGCGGTACTACTACGGAATGGACGTCTGGG |
| | | GACAGGGAACTATGGTGACCGTGTCATCCGGTGGAGGGGGAAGCGGCGG |
| | | TGGAGGCAGCGGGGGCGGGGGTTCAGAAATTGTCATGACCCAGTCCCCG |
| | | GGAACTCTTTCCCTCTCCCCCGGGGAATCCGCGACTTTGTCCTGCCGGG |
| | | CCAGCCAGCGCGTGGCCTCGAACTACCTCGCATGGTACCAGCATAAGCC |
| | | AGGCCAAGCCCCTTCCCTGCTGATTTCCGGGGCTAGCAGCCGCGCCACT |
| | | GGCGTGCCGGATAGGTTCTCGGGAAGCGGCTCGGGTACCGATTTCACCC |
| | | TGGCAATCTCGCGGCTGGAACCGGAGGATTCGGCCGTGTACTACTGCCA |
| | | GCACTATGACTCATCCCCCTCCTGGACATTCGGACAGGGCACCAAGGTC |
| | | GAGATCAAG |
| BCMA_EBB- | 187 | EVQLVETGGGLVQPGGSLRLSCAASGFTFSSYAMSWVRQAPGKGLEWVS |
| C1978-A10- | | AISGSGGSTYYADSVKGRFTMSRENDKNSVFLQMNSLRVEDTGVYYCAR |
| aa | | ANYKRELRYYYGMDVWGQGTMVTVSS |
| VH | | |
| BCMA_EBB- | 208 | EIVMTQSPGTLSLSPGESATLSCRASQRVASNYLAWYQHKPGQAPSLLI |
| C1978-A10- | | SGASSRATGVPDRFSGSGSGTDFTLAISRLEPEDSAVYYCQHYDSSPSW |
| aa | | TFGQGTKVEIK |
| VL | | |
| BCMA_EBB- | 229 | MALPVTALLLPLALLLHAARPEVQLVETGGGLVQPGGSLRLSCAA |
| C1978-A10- | | SGFTFSSYAMSWVRQAPGKGLEWVSAISGSGGSTYYADSVKGRFT |
| aa | | MSRENDKNSVFLQMNSLRVEDTGVYYCARANYKRELRYYYGMD |
| Full CART | | VWGQGTMVTVSSGGGGSGGGGSGGGGSEIVMTQSPGTLSLSPGES |
| | | ATLSCRASQRVASNYLAWYQHKPGQAPSLLISGASSRATGVPDRF |
| | | SGSGSGTDFTLAISRLEPEDSAVYYCQHYDSSPSWTFGQGTKVEIK |
| | | TTTPAPRPPTPAPTIASQPLSLRPEACRPAAGGAVHTRGLDFACDIY |
| | | IWAPLAGTCGVLLLSLVITLYCKRGRKKLLYIFKQPFMRPVQTTQE |
| | | EDGCSCRFPEEEEGGCELRVKFSRSADAPAYKQGQNQLYNELNLG |
| | | RREEYDVLDKRRGRDPEMGGKPRRKNPQEGLYNELQKDKMAEA |
| | | YSEIGMKGERRRGKGHDGLYQGLSTATKDTYDALHMQALPPR |
| BCMA_EBB- | 250 | ATGGCCCTCCCTGTCACCGCCCTGCTGCTTCCGCTGGCTCTTCTGCTCC |
| C1978-A10- | | ACGCCGCTCGGCCCGAAGTGCAACTGGTGGAAACCGGTGGAGGACTCGT |
| nt | | GCAGCCTGGCGGCAGCCTCCGGCTGAGCTGCGCCGCTTCGGGATTCACC |
| Full CART | | TTTTCCTCCTACGCGATGTCTTGGGTCAGACAGGCCCCCGGAAAGGGGC |
| | | TGGAATGGGTGTCAGCCATCTCCGGCTCCGGCGGATCAACGTACTACGC |
| | | CGACTCCGTGAAAGGCCGGTTCACCATGTCGCGCGAGAATGACAAGAAC |
| | | TCCGTGTTCCTGCAAATGAACTCCCTGAGGGTGGAGGACACCGGAGTGT |
| | | ACTATTGTGCGCGCGCCAACTACAAGAGAGAGCTGCGGTACTACTACGG |
| | | AATGGACGTCTGGGGACAGGGAACTATGGTGACCGTGTCATCCGGTGGA |
| | | GGGGGAAGCGGCGGTGGAGGCAGCGGGGGCGGGGGTTCAGAAATTGTCA |
| | | TGACCCAGTCCCCGGGAACTCTTTCCCTCTCCCCCGGGGAATCCGCGAC |
| | | TTTGTCCTGCCGGGCCAGCCAGCGCGTGGCCTCGAACTACCTCGCATGG |
| | | TACCAGCATAAGCCAGGCCAAGCCCCTTCCCTGCTGATTTCCGGGGCTA |
| | | GCAGCCGCGCCACTGGCGTGCCGGATAGGTTCTCGGGAAGCGGCTCGGG |
| | | TACCGATTTCACCCTGGCAATCTCGCGGCTGGAACCGGAGGATTCGGCC |
| | | GTGTACTACTGCCAGCACTATGACTCATCCCCCTCCTGGACATTCGGAC |
| | | AGGGCACCAAGGTCGAGATCAAGACCACTACCCCAGCACCGAGGCCACC |
| | | CACCCCGGCTCCTACCATCGCCTCCCAGCCTCTGTCCCTGCGTCCGGAG |
| | | GCATGTAGACCCGCAGCTGGTGGGGCCGTGCATACCCGGGGTCTTGACT |
| | | TCGCCTGCGATATCTACATTTGGGCCCCTCTGGCTGGTACTTGCGGGGT |
| | | CCTGCTGCTTTCACTCGTGATCACTCTTTACTGTAAGCGCGGTCGGAAG |
| | | AAGCTGCTGTACATCTTTAAGCAACCCTTCATGAGGCCTGTGCAGACTA |
| | | CTCAAGAGGAGGACGGCTGTTCATGCCGGTTCCCAGAGGAGGAGGAAGG |
| | | CGGCTGCGAACTGCGCGTGAAATTCAGCCGCAGCGCAGATGCTCCAGCC |
| | | TACAAGCAGGGGCAGAACCAGCTCTACAACGAACTCAATCTTGGTCGGA |
| | | GAGAGGAGTACGACGTGCTGGACAAGCGGAGAGGACGGGACCCAGAAAT |
| | | GGGCGGGAAGCCGCGCAGAAAGAATCCCCAAGAGGGCCTGTACAACGAG |
| | | CTCCAAAAGGATAAGATGGCAGAAGCCTATAGCGAGATTGGTATGAAAG |
| | | GGGAACGCAGAAGAGGCAAAGGCCACGACGGACTGTACCAGGGACTCAG |
| | | CACCGCCACCAAGGACACCTATGACGCTCTTCACATGCAGGCCCTGCCG |
| | | CCTCGG |

BCMA_EBB-C1978-D4

| | | |
|---|---|---|
| BCMA_EBB- | 146 | EVQLLETGGGLVQPGGSLRLSCAASGFSFSSYAMSWVRQAPGKGLEWVS |
| C1978-D4-aa | | AISGSGGSTYYADSVKGRFTISRDNSKNTLYLQMNSLRAEDTAVYYCAK |
| ScFv domain | | ALVGATGAFDIWGQGTLVTVSSGGGGSGGGGSGGGGSEIVLTQSPGTLS |
| | | LSPGERATLSCRASQSLSSNFLAWYQQKPGQAPGLLIYGASNWATGTPD |
| | | RFSGSGSGTDFTLTITRLEPEDFAVYYCQYYGTSPMYTFGQGTKVEIK |
| BCMA_EBB- | 167 | GAAGTGCAGCTGCTCGAAACCGGTGGAGGGCTGGTGCAGCCAGGGGGCT |
| C1978-D4-nt | | CCCTGAGGCTTTCATGCGCCGCTAGCGGATTCTCCTTCTCCTCTTACGC |
| ScFv domain | | CATGTCGTGGGTCCGCCAAGCCCCTGGAAAAGGCCTGGAATGGGTGTCC |
| | | GCGATTTCCGGGAGCGGAGGTTCGACCTATTACGCCGACTCCGTGAAGG |
| | | GCCGCTTTACCATCTCCCGGGATAACTCCAAGAACACTCTGTACCTCCA |
| | | AATGAACTCGCTGAGAGCCGAGGACACCGCCGTGTATTACTGCGCGAAG |
| | | GCGCTGGTCGGCGCGACTGGGGCATTCGACATCTGGGGACAGGGAACTC |
| | | TTGTGACCGTGTCGAGCGGAGGCGGCGGCTCCGGCGGAGGAGGGAGCGG |
| | | GGGCGGTGGTTCCGAAATCGTGTTGACTCAGTCCCCGGGAACCCTGAGC |
| | | TTGTCACCCGGGGAGCGGGCCACTCTCTCCTGTCGCGCCTCCCAATCGC |
| | | TCTCATCCAATTTCCTGGCCTGGTACCAGCAGAAGCCCGGACAGGCCCC |
| | | GGGCCTGCTCATCTACGGCGCTTCAAACTGGGCAACGGGAACCCCTGAT |
| | | CGGTTCAGCGGAAGCGGATCGGGTACTGACTTTACCCTGACCATCACCA |
| | | GACTGGAACCGGAGGACTTCGCCGTGTACTACTGCCAGTACTACGGCAC |
| | | CTCCCCCATGTACACATTCGGACAGGGTACCAAGGTCGAGATTAAG |
| BCMA_EBB- | 188 | EVQLLETGGGLVQPGGSLRLSCAASGFSFSSYAMSWVRQAPGKGLEWVS |
| C1978-D4-aa | | AISGSGGSTYYADSVKGRFTISRDNSKNTLYLQMNSLRAEDTAVYYCAK |
| VH | | ALVGATGAFDIWGQGTLVTVSS |
| BCMA_EBB- | 209 | EIVLTQSPGTLSLSPGERATLSCRASQSLSSNFLAWYQQKPGQAPGLLI |
| C1978-D4-aa | | YGASNWATGTPDRFSGSGSGTDFTLTITRLEPEDFAVYYCQYYGTSPMY |
| VL | | TFGQGTKVEIK |
| BCMA_EBB- | 230 | MALPVTALLLPLALLLHAARPEVQLLETGGGLVQPGGSLRLSCAASGFS |
| C1978-D4-aa | | FSSYAMSWVRQAPGKGLEWVSAISGSGGSTYYADSVKGRFTISRDNSKN |
| Full CART | | TLYLQMNSLRAEDTAVYYCAKALVGATGAFDIWGQGTLVTVSSGGGGSG |
| | | GGGSGGGGSEIVLTQSPGTLSLSPGERATLSCRASQSLSSNFLAWYQQK |
| | | PGQAPGLLIYGASNWATGTPDRFSGSGSGTDFTLTITRLEPEDFAVYYC |
| | | QYYGTSPMYTFGQGTKVEIKTTTPAPRPPTPAPTIASQPLSLRPEACRP |
| | | AAGGAVHTRGLDFACDIYIWAPLAGTCGVLLLSLVITLYCKRGRKKLLY |
| | | IFKQPFMRPVQTTQEEDGCSCRFPEEEEGGCELRVKFSRSADAPAYKQG |
| | | QNQLYNELNLGRREEYDVLDKRRGRDPEMGGKPRRKNPQEGLYNELQKD |
| | | KMAEAYSEIGMKGERRRGKGHDGLYQGLSTATKDTYDALHMQALPPR |
| BCMA_EBB- | 251 | ATGGCCCTCCCTGTCACCGCCCTGCTGCTTCCGCTGGCTCTTCTGCTCC |
| C1978-D4-nt | | ACGCCGCTCGGCCCGAAGTGCAGCTGCTCGAAACCGGTGGAGGGCTGGT |
| Full CART | | GCAGCCAGGGGGCTCCCTGAGGCTTTCATGCGCCGCTAGCGGATTCTCC |
| | | TTCTCCTCTTACGCCATGTCGTGGGTCCGCCAAGCCCCTGGAAAAGGCC |
| | | TGGAATGGGTGTCCGCGATTTCCGGGAGCGGAGGTTCGACCTATTACGC |
| | | CGACTCCGTGAAGGGCCGCTTTACCATCTCCCGGGATAACTCCAAGAAC |
| | | ACTCTGTACCTCCAAATGAACTCGCTGAGAGCCGAGGACACCGCCGTGT |
| | | ATTACTGCGCGAAGGCGCTGGTCGGCGCGACTGGGGCATTCGACATCTG |
| | | GGGACAGGGAACTCTTGTGACCGTGTCGAGCGGAGGCGGCGGCTCCGGC |
| | | GGAGGAGGGAGCGGGGGCGGTGGTTCCGAAATCGTGTTGACTCAGTCCC |
| | | CGGGAACCCTGAGCTTGTCACCCGGGGAGCGGGCCACTCTCTCCTGTCG |
| | | CGCCTCCCAATCGCTCTCATCCAATTTCCTGGCCTGGTACCAGCAGAAG |
| | | CCCGGACAGGCCCCGGGCCTGCTCATCTACGGCGCTTCAAACTGGGCAA |
| | | CGGGAACCCCTGATCGGTTCAGCGGAAGCGGATCGGGTACTGACTTTAC |
| | | CCTGACCATCACCAGACTGGAACCGGAGGACTTCGCCGTGTACTACTGC |
| | | CAGTACTACGGCACCTCCCCCATGTACACATTCGGACAGGGTACCAAGG |
| | | TCGAGATTAAGACCACTACCCCAGCACCGAGGCCACCCACCCCGGCTCC |
| | | TACCATCGCCTCCCAGCCTCTGTCCCTGCGTCCGGAGGCATGTAGACCC |
| | | GCAGCTGGTGGGGCCGTGCATACCCGGGGTCTTGACTTCGCCTGCGATA |
| | | TCTACATTTGGGCCCCTCTGGCTGGTACTTGCGGGGTCCTGCTGCTTTC |
| | | ACTCGTGATCACTCTTTACTGTAAGCGCGGTCGGAAGAAGCTGCTGTAC |
| | | ATCTTTAAGCAACCCTTCATGAGGCCTGTGCAGACTACTCAAGAGGAGG |
| | | ACGGCTGTTCATGCCGGTTCCCAGAGGAGGAGGAAGGCGGCTGCGAACT |
| | | GCGCGTGAAATTCAGCCGCAGCGCAGATGCTCCAGCCTACAAGCAGGGG |
| | | CAGAACCAGCTCTACAACGAACTCAATCTTGGTCGGAGAGAGGAGTACG |
| | | ACGTGCTGGACAAGCGGAGAGGACGGGACCCAGAAATGGGCGGGAAGCC |
| | | GCGCAGAAAGAATCCCCAAGAGGGCCTGTACAACGAGCTCCAAAAGGAT |
| | | AAGATGGCAGAAGCCTATAGCGAGATTGGTATGAAAGGGGAACGCAGAA |
| | | GAGGCAAAGGCCACGACGGACTGTACCAGGGACTCAGCACCGCCACCAA |
| | | GGACACCTATGACGCTCTTCACATGCAGGCCCTGCCGCCTCGG |

BCMA_EBB-C1980-A2

| | | |
|---|---|---|
| BCMA_EBB- | 147 | EVQLLESGGGLVQPGGSLRLSCAASGFTFSSYAMSWVRQAPGKGLEWVS |
| C1980-A2-aa | | AISGSGGSTYYADSVKGRFTISRDNSKNTLYLQMNSLRAEDTAVYYCVL |
| ScFv domain | | WFGEGFDPWGQGTLVTVSSGGGGSGGGGSGGGGSDIVLTQSPLSLPVTP |
| | | GEPASISCRSSQSLLHSNGYNYLDWYLQKPGQSPQLLIYLGSNRASGVP |
| | | DRFSGSGSGTDFTLKISRVEAEDVGVYYCMQALQTPLTFGGGTKVDIK |
| BCMA_EBB- | 168 | GAAGTGCAGCTGCTTGAGAGCGGTGGAGGTCTGGTGCAGCCCGGGGGAT |
| C1980-A2-nt | | CACTGCGCCTGTCCTGTGCCGCGTCCGGTTTCACTTTCTCCTCGTACGC |
| ScFv domain | | CATGTCGTGGGTCAGACAGGCACCGGGAAAGGGACTGGAATGGGTGTCA |
| | | GCCATTTCGGGTTCGGGGGGCAGCACCTACTACGCTGACTCCGTGAAGG |
| | | GCCGGTTCACCATTTCCCGCGACAACTCCAAGAACACCTTGTACCTCCA |
| | | AATGAACTCCCTGCGGGCCGAAGATACCGCCGTGTATTACTGCGTGCTG |
| | | TGGTTCGGAGAGGGATTCGACCCGTGGGGACAAGGAACACTCGTGACTG |
| | | TGTCATCCGGCGGAGGCGGCAGCGGTGGCGGCGGTTCCGGCGGCGGCGG |
| | | ATCTGACATCGTGTTGACCCAGTCCCCTCTGAGCCTGCCGGTCACTCCT |
| | | GGCGAACCAGCCAGCATCTCCTGCCGGTCGAGCCAGTCCCTCCTGCACT |
| | | CCAATGGGTACAACTACCTCGATTGGTATCTGCAAAAGCCGGGCCAGAG |
| | | CCCCCAGCTGCTGATCTACCTTGGGTCAAACCGCGCTTCCGGGGTGCCT |
| | | GATAGATTCTCCGGGTCCGGGAGCGGAACCGACTTTACCCTGAAAATCT |
| | | CGAGGGTGGAGGCCGAGGACGTCGGAGTGTACTACTGCATGCAGGCGCT |
| | | CCAGACTCCCCTGACCTTCGGAGGAGGAACGAAGGTCGACATCAAGA |
| BCMA_EBB- | 189 | EVQLLESGGGLVQPGGSLRLSCAASGFTFSSYAMSWVRQAPGKGLEWVS |
| C1980-A2-aa | | AISGSGGSTYYADSVKGRFTISRDNSKNTLYLQMNSLRAEDTAVYYCVL |
| VH | | WFGEGFDPWGQGTLVTVSS |
| BCMA_EBB- | 210 | DIVLTQSPLSLPVTPGEPASISCRSSQSLLHSNGYNYLDWYLQKPGQSP |
| C1980-A2-aa | | QLLIYLGSNRASGVPDRFSGSGSGTDFTLKISRVEAEDVGVYYCMQALQ |
| VL | | TPLTFGGGTKVDIK |
| BCMA_EBB- | 231 | MALPVTALLLPLALLLHAARPEVQLLESGGGLVQPGGSLRLSCAASGFT |
| C1980-A2-aa | | FSSYAMSWVRQAPGKGLEWVSAISGSGGSTYYADSVKGRFTISRDNSKN |
| Full CART | | TLYLQMNSLRAEDTAVYYCVLWFGEGFDPWGQGTLVTVSSGGGGSGGGG |
| | | SGGGGSDIVLTQSPLSLPVTPGEPASISCRSSQSLLHSNGYNYLDWYLQ |
| | | KPGQSPQLLIYLGSNRASGVPDRFSGSGSGTDFTLKISRVEAEDVGVYY |
| | | CMQALQTPLTFGGGTKVDIKTTTPAPRPPTPAPTIASQPLSLRPEACRP |
| | | AAGGAVHTRGLDFACDIYIWAPLAGTCGVLLLSLVITLYCKRGRKKLLY |
| | | IFKQPFMRPVQTTQEEDGCSCRFPEEEEGGCELRVKFSRSADAPAYKQG |
| | | QNQLYNELNLGRREEYDVLDKRRGRDPEMGGKPRRKNPQEGLYNELQKD |
| | | KMAEAYSEIGMKGERRRGKGHDGLYQGLSTATKDTYDALHMQALPPR |
| BCMA_EBB- | 252 | ATGGCCCTCCCTGTCACCGCCCTGCTGCTTCCGCTGGCTCTTCTGCTCC |
| C1980-A2-nt | | ACGCCGCTCGGCCCGAAGTGCAGCTGCTTGAGAGCGGTGGAGGTCTGGT |
| Full CART | | GCAGCCCGGGGGATCACTGCGCCTGTCCTGTGCCGCGTCCGGTTTCACT |
| | | TTCTCCTCGTACGCCATGTCGTGGGTCAGACAGGCACCGGGAAAGGGAC |
| | | TGGAATGGGTGTCAGCCATTTCGGGTTCGGGGGGCAGCACCTACTACGC |
| | | TGACTCCGTGAAGGGCCGGTTCACCATTTCCCGCGACAACTCCAAGAAC |
| | | ACCTTGTACCTCCAAATGAACTCCCTGCGGGCCGAAGATACCGCCGTGT |
| | | ATTACTGCGTGCTGTGGTTCGGAGAGGGATTCGACCCGTGGGGACAAGG |
| | | AACACTCGTGACTGTGTCATCCGGCGGAGGCGGCAGCGGTGGCGGCGGT |
| | | TCCGGCGGCGGCGGATCTGACATCGTGTTGACCCAGTCCCCTCTGAGCC |
| | | TGCCGGTCACTCCTGGCGAACCAGCCAGCATCTCCTGCCGGTCGAGCCA |
| | | GTCCCTCCTGCACTCCAATGGGTACAACTACCTCGATTGGTATCTGCAA |
| | | AAGCCGGGCCAGAGCCCCCAGCTGCTGATCTACCTTGGGTCAAACCGCG |
| | | CTTCCGGGGTGCCTGATAGATTCTCCGGGTCCGGGAGCGGAACCGACTT |
| | | TACCCTGAAAATCTCGAGGGTGGAGGCCGAGGACGTCGGAGTGTACTAC |
| | | TGCATGCAGGCGCTCCAGACTCCCCTGACCTTCGGAGGAGGAACGAAGG |
| | | TCGACATCAAGACCACTACCCCAGCACCGAGGCCACCCACCCCGGCTCC |
| | | TACCATCGCCTCCCAGCCTCTGTCCCTGCGTCCGGAGGCATGTAGACCC |
| | | GCAGCTGGTGGGGCCGTGCATACCCGGGGTCTTGACTTCGCCTGCGATA |
| | | TCTACATTTGGGCCCCTCTGGCTGGTACTTGCGGGGTCCTGCTGCTTTC |
| | | ACTCGTGATCACTCTTTACTGTAAGCGCGGTCGGAAGAAGCTGCTGTAC |
| | | ATCTTTAAGCAACCCTTCATGAGGCCTGTGCAGACTACTCAAGAGGAGG |
| | | ACGGCTGTTCATGCCGGTTCCCAGAGGAGGAGGAAGGCGGCTGCGAACT |
| | | GCGCGTGAAATTCAGCCGCAGCGCAGATGCTCCAGCCTACAAGCAGGGG |
| | | CAGAACCAGCTCTACAACGAACTCAATCTTGGTCGGAGAGAGGAGTACG |
| | | ACGTGCTGGACAAGCGGAGAGGACGGGACCCAGAAATGGGCGGGAAGCC |
| | | GCGCAGAAAGAATCCCCAAGAGGGCCTGTACAACGAGCTCCAAAAGGAT |
| | | AAGATGGCAGAAGCCTATAGCGAGATTGGTATGAAAGGGGAACGCAGAA |
| | | GAGGCAAAGGCCACGACGGACTGTACCAGGGACTCAGCACCGCCACCAA |
| | | GGACACCTATGACGCTCTTCACATGCAGGCCCTGCCGCCTCGG |

BCMA_EBB-C1981-C3

| | | |
|---|---|---|
| BCMA_EBB- | 148 | QVQLVESGGGLVQPGGSLRLSCAASGFTFSSYAMSWVRQAPGKGLEWVS |
| C1981-C3-aa | | AISGSGGSTYYADSVKGRFTISRDNSKNTLYLQMNSLRAEDTAVYYCAK |
| ScFv domain | | VGYDSSGYYRDYYGMDVWGQGTTVTVSSGGGGSGGGGSGGGGSEIVLTQ |
| | | SPGTLSLSPGERATLSCRASQSVSSSYLAWYQQKPGQAPRLLIYGTSSR |
| | | ATGISDRFSGSGSGTDFTLTISRLEPEDFAVYYCQHYGNSPPKFTFGPG |
| | | TKLEIK |
| BCMA_EBB- | 169 | CAAGTGCAGCTCGTGGAGTCAGGCGGAGGACTGGTGCAGCCCGGGGGCT |
| C1981-C3-nt | | CCCTGAGACTTTCCTGCGCGGCATCGGGTTTTACCTTCTCCTCCTATGC |
| ScFv domain | | TATGTCCTGGGTGCGCCAGGCCCCGGGAAAGGGACTGGAATGGGTGTCC |
| | | GCAATCAGCGGTAGCGGGGGCTCAACATACTACGCCGACTCCGTCAAGG |
| | | GTCGCTTCACTATTTCCCGGGACAACTCCAAGAATACCCTGTACCTCCA |
| | | AATGAACAGCCTCAGGGCCGAGGATACTGCCGTGTACTACTGCGCCAAA |
| | | GTCGGATACGATAGCTCCGGTTACTACCGGGACTACTACGGAATGGACG |
| | | TGTGGGGACAGGGCACCACCGTGACCGTGTCAAGCGGCGGAGGCGGTTC |
| | | AGGAGGGGGAGGCTCCGGCGGTGGAGGGTCCGAAATCGTCCTGACTCAG |
| | | TCGCCTGGCACTCTGTCGTTGTCCCCGGGGGAGCGCGCTACCCTGTCGT |
| | | GTCGGGCGTCGCAGTCCGTGTCGAGCTCCTACCTCGCGTGGTACCAGCA |
| | | GAAGCCCGGACAGGCCCCTAGACTTCTGATCTACGGCACTTCTTCACGC |
| | | GCCACCGGGATCAGCGACAGGTTCAGCGGCTCCGGCTCCGGGACCGACT |
| | | TCACCCTGACCATTAGCCGGCTGGAGCCTGAAGATTTCGCCGTGTATTA |
| | | CTGCCAACACTACGGAAACTCGCCGCCAAAGTTCACGTTCGGACCCGGA |
| | | ACCAAGCTGGAAATCAAG |
| BCMA_EBB- | 190 | QVQLVESGGGLVQPGGSLRLSCAASGFTFSSYAMSWVRQAPGKGLEWVS |
| C1981-C3-aa | | AISGSGGSTYYADSVKGRFTISRDNSKNTLYLQMNSLRAEDTAVYYCAK |
| VH | | VGYDSSGYYRDYYGMDVWGQGTTVTVSS |
| BCMA_EBB- | 211 | EIVLTQSPGTLSLSPGERATLSCRASQSVSSSYLAWYQQKPGQAPRLLI |
| C1981-C3-aa | | YGTSSRATGISDRFSGSGSGTDFTLTISRLEPEDFAVYYCQHYGNSPPK |
| VL | | FTFGPGTKLEIK |
| BCMA_EBB- | 232 | MALPVTALLLPLALLLHAARPQVQLVESGGGLVQPGGSLRLSCAASGFT |
| C1981-C3-aa | | FSSYAMSWVRQAPGKGLEWVSAISGSGGSTYYADSVKGRFTISRDNSKN |
| Full CART | | TLYLQMNSLRAEDTAVYYCAKVGYDSSGYYRDYYGMDVWGQGTTVTVSS |
| | | GGGGSGGGGSGGGGSEIVLTQSPGTLSLSPGERATLSCRASQSVSSSYL |
| | | AWYQQKPGQAPRLLIYGTSSRATGISDRFSGSGSGTDFTLTISRLEPED |
| | | FAVYYCQHYGNSPPKFTFGPGTKLEIKTTTPAPRPPTPAPTIASQPLSL |
| | | RPEACRPAAGGAVHTRGLDFACDIYIWAPLAGTCGVLLLSLVITLYCKR |
| | | GRKKLLYIFKQPFMRPVQTTQEEDGCSCRFPEEEEGGCELRVKFSRSAD |
| | | APAYKQGQNQLYNELNLGRREEYDVLDKRRGRDPEMGGKPRRKNPQEGL |
| | | YNELQKDKMAEAYSEIGMKGERRRGKGHDGLYQGLSTATKDTYDALHMQ |
| | | ALPPR |
| BCMA_EBB- | 253 | ATGGCCCTCCCTGTCACCGCCCTGCTGCTTCCGCTGGCTCTTCTGCTCC |
| C1981-C3-nt | | ACGCCGCTCGGCCCCAAGTGCAGCTCGTGGAGTCAGGCGGAGGACTGGT |
| Full CART | | GCAGCCCGGGGGCTCCCTGAGACTTTCCTGCGCGGCATCGGGTTTTACC |
| | | TTCTCCTCCTATGCTATGTCCTGGGTGCGCCAGGCCCCGGGAAAGGGAC |
| | | TGGAATGGGTGTCCGCAATCAGCGGTAGCGGGGGCTCAACATACTACGC |
| | | CGACTCCGTCAAGGGTCGCTTCACTATTTCCCGGGACAACTCCAAGAAT |
| | | ACCCTGTACCTCCAAATGAACAGCCTCAGGGCCGAGGATACTGCCGTGT |
| | | ACTACTGCGCCAAAGTCGGATACGATAGCTCCGGTTACTACCGGGACTA |
| | | CTACGGAATGGACGTGTGGGGACAGGGCACCACCGTGACCGTGTCAAGC |
| | | GGCGGAGGCGGTTCAGGAGGGGGAGGCTCCGGCGGTGGAGGGTCCGAAA |
| | | TCGTCCTGACTCAGTCGCCTGGCACTCTGTCGTTGTCCCCGGGGGAGCG |
| | | CGCTACCCTGTCGTGTCGGGCGTCGCAGTCCGTGTCGAGCTCCTACCTC |
| | | GCGTGGTACCAGCAGAAGCCCGGACAGGCCCCTAGACTTCTGATCTACG |
| | | GCACTTCTTCACGCGCCACCGGGATCAGCGACAGGTTCAGCGGCTCCGG |
| | | CTCCGGGACCGACTTCACCCTGACCATTAGCCGGCTGGAGCCTGAAGAT |
| | | TTCGCCGTGTATTACTGCCAACACTACGGAAACTCGCCGCCAAAGTTCA |
| | | CGTTCGGACCCGGAACCAAGCTGGAAATCAAGACCACTACCCCAGCACC |
| | | GAGGCCACCCACCCCGGCTCCTACCATCGCCTCCCAGCCTCTGTCCCTG |
| | | CGTCCGGAGGCATGTAGACCCGCAGCTGGTGGGGCCGTGCATACCCGGG |
| | | GTCTTGACTTCGCCTGCGATATCTACATTTGGGCCCCTCTGGCTGGTAC |
| | | TTGCGGGGTCCTGCTGCTTTCACTCGTGATCACTCTTTACTGTAAGCGC |
| | | GGTCGGAAGAAGCTGCTGTACATCTTTAAGCAACCCTTCATGAGGCCTG |
| | | TGCAGACTACTCAAGAGGAGGACGGCTGTTCATGCCGGTTCCCAGAGGA |
| | | GGAGGAAGGCGGCTGCGAACTGCGCGTGAAATTCAGCCGCAGCGCAGAT |
| | | GCTCCAGCCTACAAGCAGGGGCAGAACCAGCTCTACAACGAACTCAATC |
| | | TTGGTCGGAGAGAGGAGTACGACGTGCTGGACAAGCGGAGAGGACGGGA |
| | | CCCAGAAATGGGCGGGAAGCCGCGCAGAAAGAATCCCCAAGAGGGCCTG |
| | | TACAACGAGCTCCAAAAGGATAAGATGGCAGAAGCCTATAGCGAGATTG |
| | | GTATGAAAGGGGAACGCAGAAGAGGCAAAGGCCACGACGGACTGTACCA |
| | | GGGACTCAGCACCGCCACCAAGGACACCTATGACGCTCTTCACATGCAG |
| | | GCCCTGCCGCCTCGG |

BCMA_EBB-C1978-G4

| | | |
|---|---|---|
| BCMA_EBB- | 149 | EVQLVESGGGLVQPGGSLRLSCAASGFTFSSYAMSWVRQAPGKGLEWVS |
| C1978-G4-aa | | AISGSGGSTYYADSVKGRFTISRDNSKNTLYLQMNSLRAEDTAVYYCAK |
| ScFv domain | | MGWSSGYLGAFDIWGQGTTVTVSSGGGGSGGGGSGGGGSEIVLTQSPGT |
| | | LSLSPGERATLSCRASQSVASSFLAWYQQKPGQAPRLLIYGASGRATGI |
| | | PDRFSGSGSGTDFTLTISRLEPEDFAVYYCQHYGGSPRLTFGGGTKVDI |
| | | K |
| BCMA_EBB- | 170 | GAAGTCCAACTGGTGGAGTCCGGGGGAGGGCTCGTGCAGCCCGGAGGCA |
| C1978-G4-nt | | GCCTTCGGCTGTCGTGCGCCGCCTCCGGGTTCACGTTCTCATCCTACGC |
| ScFv domain | | GATGTCGTGGGTCAGACAGGCACCAGGAAAGGGACTGGAATGGGTGTCC |
| | | GCCATTAGCGGCTCCGGCGGTAGCACCTACTATGCCGACTCAGTGAAGG |
| | | GAAGGTTCACTATCTCCCGCGACAACAGCAAGAACACCCTGTACCTCCA |
| | | AATGAACTCTCTGCGGGCCGAGGATACCGCGGTGTACTATTGCGCCAAG |
| | | ATGGGTTGGTCCAGCGGATACTTGGGAGCCTTCGACATTTGGGGACAGG |
| | | GCACTACTGTGACCGTGTCCTCCGGGGGTGGCGGATCGGGAGGCGGCGG |
| | | CTCGGGTGGAGGGGGTTCCGAAATCGTGTTGACCCAGTCACCGGGAACC |
| | | CTCTCGCTGTCCCCGGGAGAACGGGCTACACTGTCATGTAGAGCGTCCC |
| | | AGTCCGTGGCTTCCTCGTTCCTGGCCTGGTACCAGCAGAAGCCGGGACA |
| | | GGCACCCCGCCTGCTCATCTACGGAGCCAGCGGCCGGGCGACCGGCATC |
| | | CCTGACCGCTTCTCCGGTTCCGGCTCGGGCACCGACTTTACTCTGACCA |
| | | TTAGCAGGCTTGAGCCCGAGGATTTTGCCGTGTACTACTGCCAACACTA |
| | | CGGGGGGAGCCCTCGCCTGACCTTCGGAGGCGGAACTAAGGTCGATATC |
| | | AAAA |
| BCMA_EBB- | 191 | EVQLVESGGGLVQPGGSLRLSCAASGFTFSSYAMSWVRQAPGKGLEWVS |
| C1978-G4-aa | | AISGSGGSTYYADSVKGRFTISRDNSKNTLYLQMNSLRAEDTAVYYCAK |
| VH | | MGWSSGYLGAFDIWGQGTTVTVSS |
| BCMA_EBB- | 212 | EIVLTQSPGTLSLSPGERATLSCRASQSVASSFLAWYQQKPGQAPRLLI |
| C1978-G4-aa | | YGASGRATGIPDRFSGSGSGTDFTLTISRLEPEDFAVYYCQHYGGSPRL |
| VL | | TFGGGTKVDIK |
| BCMA_EBB- | 233 | MALPVTALLLPLALLLHAARPEVQLVESGGGLVQPGGSLRLSCAASGFT |
| C1978-G4-aa | | FSSYAMSWVRQAPGKGLEWVSAISGSGGSTYYADSVKGRFTISRDNSKN |
| Full CART | | TLYLQMNSLRAEDTAVYYCAKMGWSSGYLGAFDIWGQGTTVTVSSGGGG |
| | | SGGGGSGGGGSEIVLTQSPGTLSLSPGERATLSCRASQSVASSFLAWYQ |
| | | QKPGQAPRLLIYGASGRATGIPDRFSGSGSGTDFTLTISRLEPEDFAVY |
| | | YCQHYGGSPRLTFGGGTKVDIKTTTPAPRPPTPAPTIASQPLSLRPEAC |
| | | RPAAGGAVHTRGLDFACDIYIWAPLAGTCGVLLLSLVITLYCKRGRKKL |
| | | LYIFKQPFMRPVQTTQEEDGCSCRFPEEEEGGCELRVKFSRSADAPAYK |
| | | QGQNQLYNELNLGRREEYDVLDKRRGRDPEMGGKPRRKNPQEGLYNELQ |
| | | KDKMAEAYSEIGMKGERRRGKGHDGLYQGLSTATKDTYDALHMQALPPR |
| BCMA_EBB- | 254 | ATGGCCCTCCCTGTCACCGCCCTGCTGCTTCCGCTGGCTCTTCTGCTCC |
| C1978-G4-nt | | ACGCCGCTCGGCCCGAAGTCCAACTGGTGGAGTCCGGGGGAGGGCTCGT |
| Full CART | | GCAGCCCGGAGGCAGCCTTCGGCTGTCGTGCGCCGCCTCCGGGTTCACG |
| | | TTCTCATCCTACGCGATGTCGTGGGTCAGACAGGCACCAGGAAAGGGAC |
| | | TGGAATGGGTGTCCGCCATTAGCGGCTCCGGCGGTAGCACCTACTATGC |
| | | CGACTCAGTGAAGGGAAGGTTCACTATCTCCCGCGACAACAGCAAGAAC |
| | | ACCCTGTACCTCCAAATGAACTCTCTGCGGGCCGAGGATACCGCGGTGT |
| | | ACTATTGCGCCAAGATGGGTTGGTCCAGCGGATACTTGGGAGCCTTCGA |
| | | CATTTGGGGACAGGGCACTACTGTGACCGTGTCCTCCGGGGGTGGCGGA |
| | | TCGGGAGGCGGCGGCTCGGGTGGAGGGGGTTCCGAAATCGTGTTGACCC |
| | | AGTCACCGGGAACCCTCTCGCTGTCCCCGGGAGAACGGGCTACACTGTC |
| | | ATGTAGAGCGTCCCAGTCCGTGGCTTCCTCGTTCCTGGCCTGGTACCAG |
| | | CAGAAGCCGGGACAGGCACCCCGCCTGCTCATCTACGGAGCCAGCGGCC |
| | | GGGCGACCGGCATCCCTGACCGCTTCTCCGGTTCCGGCTCGGGCACCGA |
| | | CTTTACTCTGACCATTAGCAGGCTTGAGCCCGAGGATTTTGCCGTGTAC |
| | | TACTGCCAACACTACGGGGGGAGCCCTCGCCTGACCTTCGGAGGCGGAA |
| | | CTAAGGTCGATATCAAAACCACTACCCCAGCACCGAGGCCACCCACCCC |
| | | GGCTCCTACCATCGCCTCCCAGCCTCTGTCCCTGCGTCCGGAGGCATGT |
| | | AGACCCGCAGCTGGTGGGGCCGTGCATACCCGGGGTCTTGACTTCGCCT |
| | | GCGATATCTACATTTGGGCCCCTCTGGCTGGTACTTGCGGGGTCCTGCT |
| | | GCTTTCACTCGTGATCACTCTTTACTGTAAGCGCGGTCGGAAGAAGCTG |
| | | CTGTACATCTTTAAGCAACCCTTCATGAGGCCTGTGCAGACTACTCAAG |
| | | AGGAGGACGGCTGTTCATGCCGGTTCCCAGAGGAGGAGGAAGGCGGCTG |
| | | CGAACTGCGCGTGAAATTCAGCCGCAGCGCAGATGCTCCAGCCTACAAG |
| | | CAGGGGCAGAACCAGCTCTACAACGAACTCAATCTTGGTCGGAGAGAGG |
| | | AGTACGACGTGCTGGACAAGCGGAGAGGACGGGACCCAGAAATGGGCGG |
| | | GAAGCCGCGCAGAAAGAATCCCCAAGAGGGCCTGTACAACGAGCTCCAA |
| | | AAGGATAAGATGGCAGAAGCCTATAGCGAGATTGGTATGAAAGGGGAAC |
| | | GCAGAAGAGGCAAAGGCCACGACGGACTGTACCAGGGACTCAGCACCGC |
| | | CACCAAGGACACCTATGACGCTCTTCACATGCAGGCCCTGCCGCCTCGG |

TABLE 3
Heavy Chain Variable Domain CDRs according to the Kabat numbering scheme
(Kabat et al. (1991), ″Sequences of Proteins of Immunological Interest,″
5th Ed. Public Health Service, National Institutes of Health, Bethesda, MD)

| | | | | SEQ | | SEQ |
|---|---|---|---|---|---|---|
| | | SEQ | | ID | | ID |
| Candidate | HCDR1 | ID NO | HCDR2 | NO | HCDR3 | NO |
| 139109 | NHGMS | 1051 | GIVYSGSTYYAA | 1091 | HGGESDV | 1131 |
| | | | SVKG | | | |
| 139103 | NYAMS | 1052 | GISRSGENTYYADS | 1092 | SPAHYYGGMDV | 1132 |
| | | | VKG | | | |
| 139105 | DYAMH | 1053 | GISWNSGSIGYADSV | 1093 | HSFLAY | 1133 |
| | | | KG | | | |
| 139111 | NHGMS | 1054 | GIVYSGSTYYAASV | 1094 | HGGESDV | 1134 |
| | | | KG | | | |
| 139100 | NFGIN | 1055 | WINPKNNNTNYAQ | 1095 | GPYYYQSYMDV | 1135 |
| | | | KFQG | | | |
| 139101 | SDAMT | 1056 | VISGSGGTTYYADS | 1096 | LDSSGYYYARGPRY | 1136 |
| | | | VKG | | | |
| 139102 | NYGIT | 1057 | WISAYNGNTNYAQ | 1097 | GPYYYYMDV | 1137 |
| | | | KFQG | | | |
| 139104 | NHGMS | 1058 | GIVYSGSTYYAASV | 1098 | HGGESDV | 1138 |
| | | | KG | | | |
| 139106 | NHGMS | 1059 | GIVYSGSTYYAASV | 1099 | HGGESDV | 1139 |
| | | | KG | | | |
| 139107 | NHGMS | 1060 | GIVYSGSTYYAASV | 1100 | HGGESDV | 1140 |
| | | | KG | | | |
| 139108 | DYYMS | 1061 | YISSSGSTIYYADSV | 1101 | ESGDGMDV | 1141 |
| | | | KG | | | |
| 139110 | DYYMS | 1062 | YISSSGNTIYYADSV | 1102 | STMVREDY | 1142 |
| | | | KG | | | |
| 139112 | NHGMS | 1063 | GIVYSGSTYYAASV | 1103 | HGGESDV | 1143 |
| | | | KG | | | |
| 139113 | NHGMS | 1064 | GIVYSGSTYYAASV | 1104 | HGGESDV | 1144 |
| | | | KG | | | |
| 139114 | NHGMS | 1065 | GIVYSGSTYYAASV | 1105 | HGGESDV | 1145 |
| | | | KG | | | |
| 149362 | SSYYYW | 1066 | SIYYSGSAYYNPSLK | 1106 | HWQEWPDAFDI | 1146 |
| | G | | S | | | |
| 149363 | TSGMCVS | 1067 | RIDWDEDKFYSTSL | 1107 | SGAGGTSATAFDI | 1147 |
| | | | KT | | | |
| 149364 | SYSMN | 1068 | SISSSSSYIYYADSVK | 1108 | TIAAVYAFDI | 1148 |
| | | | G | | | |
| 149365 | DYYMS | 1069 | YISSSGSTIYYADSV | 1109 | DLRGAFDI | 1149 |
| | | | KG | | | |
| 149366 | SHYIH | 1070 | MINPSGGVTAYSQT | 1110 | EGSGSGWYFDF | 1150 |
| | | | LQG | | | |
| 149367 | SGGYYW | 1071 | YIYYSGSTYYNPSLK | 1111 | AGIAARLRGAFDI | 1151 |
| | S | | S | | | |
| 149368 | SYAIS | 1072 | GIIPIFGTANYAQKF | 1112 | RGGYQLLRWDVGLL | 1152 |
| | | | QG | | RSAFDI | |
| 149369 | SNSAAW | 1073 | RTYYRSKWYSFYAI | 1113 | SSPEGLFLYWFDP | 1153 |
| | N | | SLKS | | | |
| BCMA_EBB- | SYAMS | 1074 | AISGSGGSTYYADS | 1114 | VEGSGSLDY | 1154 |
| C1978-A4 | | | VKG | | | |
| BCMA_EBB- | RYPMS | 1075 | GISDSGVSTYYADS | 1115 | RAGSEASDI | 1155 |
| C1978-G1 | | | AKG | | | |
| BCMA_EBB- | SYAMS | 1076 | AISGSGGSTYYADS | 1116 | ATYKRELRYYYGM | 1156 |
| C1979-C1 | | | VKG | | DV | |
| BCMA_EBB- | SYAMS | 1077 | AISGSGGSTYYADS | 1117 | ATYKRELRYYYGM | 1157 |
| C1978-C7 | | | VKG | | DV | |
| BCMA_EBB- | DYAMH | 1078 | GISWNSGSIGYADSV | 1118 | VGKAVPDV | 1158 |
| C1978- | | | KG | | | |
| D10 | | | | | | |
| BCMA_EBB- | DYAMH | 1079 | SINWKGNSLAYGDS | 1119 | HQGVAYYNYAMDV | 1159 |
| C1979- | | | VKG | | | |
| C12 | | | | | | |
| BCMA_EBB- | SYAMS | 1080 | AISGSGGSTYYADS | 1120 | VVRDGMDV | 1160 |
| C1980-G4 | VKG | | | | | |
| BCMA_EBB- | SYAMS | 1081 | AISGSGGSTYYADS | 1121 | IPQTGTFDY | 1161 |
| C1980-D2 | | | VKG | | | |
| BCMA_EBB- | SYAMS | 1082 | AISGSGGSTYYADS | 1122 | ANYKRELRYYYGM | 1162 |
| C1978- | | | VKG | | DV | |
| A10 | | | | | | |
| BCMA_EBB- | SYAMS | 1083 | AISGSGGSTYYADS | 1123 | ALVGATGAFDI | 1163 |
| C1978-D4 | | | VKG | | | |
| BCMA_EBB- | SYAMS | 1084 | AISGSGGSTYYADS | 1124 | WFGEGFDP | 1164 |
| C1980-A2 | | | VKG | | | |
| BCMA_EBB- | SYAMS | 1085 | AISGSGGSTYYADS | 1125 | VGYDSSGYYRDYYG | 1165 |
| C1981-C3 | | | VKG | | MDV | |
| BCMA_EBB- | SYAMS | 1086 | AISGSGGSTYYADS | 1126 | MGWSSGYLGAFDI | 1166 |
| C1978-G4 | | | VKG | | | |
| A7D12.2 | NFGMN | 1087 | WINTYTGESYFADD | 1127 | GEIYYGYDGGFAY | 1167 |
| | | | FKG | | | |
| C11D5.3 | DYSIN | 1088 | WINTETREPAYAYD | 1128 | DYSYAMDY | 1168 |
| | | | FRG | | | |
| C12A3.2 | HYSMN | 1089 | RINTESGVPIYADDF | 1129 | DYLYSLDF | 1169 |
| | | | KG | | | |
| C13F12.1 | HYSMN | 1090 | RINTETGEPLYADDF | 1130 | DYLYSCDY | 1170 |
| | | | KG | | | |

TABLE 4
Light Chain Variable Domain CDRs according to the Kabat numbering scheme
(Kabat et al. (1991), ″Sequences of Proteins of Immunological Interest,″
5th Ed. Public Health Service, National Institutes of Health, Bethesda, MD)

| | | SEQ ID | | SEQ ID | | SEQ ID |
|---|---|---|---|---|---|---|
| Candidate | LCDR1 | NO | LCDR2 | NO | LCDR3 | NO |
| 139109 | RASQSISSYLN | 1171 | AASSLQS | 1211 | QQSYSTPYT | 1251 |
| 139103 | RASQSISSSFLA | 1172 | GASRRAT | 1212 | QQYHSSPSWT | 1252 |
| 139105 | RSSQSLLHSNGYNYL | 1173 | LGSNRAS | 1213 | MQALQTPYT | 1253 |
| | D | | | | | |
| 139111 | KSSQSLLRNDGKTPL | 1174 | EVSNRFS | 1214 | MQNIQFPS | 1254 |
| | Y | | | | | |
| 139100 | RSSQSLLHSNGYNYL | 1175 | LGSKRAS | 1215 | MQALQTPYT | 1255 |
| | N | | | | | |
| 139101 | RASQSISSYLN | 1176 | GASTLAS | 1216 | QQSYKRAS | 1256 |
| 139102 | RSSQSLLYSNGYNYV | 1177 | LGSNRAS | 1217 | MQGRQFPYS | 1257 |
| | D | | | | | |
| 139104 | RASQSVSSNLA | 1178 | GASTRAS | 1218 | QQYGSSLT | 1258 |
| 139106 | RASQSVSSKLA | 1179 | GASIRAT | 1219 | QQYGSSSWT | 1259 |
| 139107 | RASQSVGSTNLA | 1180 | DASNRAT | 1220 | QQYGSSPPWT | 1260 |
| 139108 | RASQSISSYLN | 1181 | AASSLQS | 1221 | QQSYTLA | 1261 |
| 139110 | KSSESLVHNSGKTYL | 1182 | EVSNRDS | 1222 | MQGTHWPGT | 1262 |
| | N | | | | | |
| 139112 | QASEDINKFLN | 1183 | DASTLQT | 1223 | QQYESLPLT | 1263 |
| 139113 | RASQSVGSNLA | 1184 | GASTRAT | 1224 | QQYNDWLPVT | 1264 |
| 139114 | RASQSIGSSSLA | 1185 | GASSRAS | 1225 | QQYAGSPPFT | 1265 |
| 149362 | KASQDIDDAMN | 1186 | SATSPVP | 1226 | LQHDNFPLT | 1266 |
| 149363 | RASQDIYNNLA | 1187 | AANKSQS | 1227 | QHYYRFPYS | 1267 |
| 149364 | RSSQSLLHSNGYNYL | 1188 | LGSNRAS | 1228 | MQALQTPYT | 1268 |
| | D | | | | | |
| 149365 | GGNNIGTKSVH | 1189 | DDSVRPS | 1229 | QVWDSDSEHV | 1269 |
| | | | | | V | |
| 149366 | SGDGLSKKYVS | 1190 | RDKERPS | 1230 | QAWDDTTVV | 1270 |
| 149367 | RASQGIRNWLA | 1191 | AASNLQS | 1231 | QKYNSAPFT | 1271 |
| 149368 | GGNNIGSKSVH | 1192 | GKNNRPS | 1232 | SSRDSSGDHLR | 1272 |
| | | | | | V | |
| 149369 | QGDSLGNYYAT | 1193 | GTNNRPS | 1233 | NSRDSSGHHLL | 1273 |
| BCMA_EBB- | RASQSVSSAYLA | 1194 | GASTRAT | 1234 | QHYGSSFNGSS | 1274 |
| C1978-A4 | | | | | LFT | |
| BCMA_EBB- | RASQSVSNSLA | 1195 | DASSRAT | 1235 | QQFGTSSGLT | 1275 |
| C1978-G1 | | | | | | |
| BCMA_EBB- | RASQSVSSSFLA | 1196 | GASSRAT | 1236 | QQYHSSPSWT | 1276 |
| C1979-C1 | | | | | | |
| BCMA_EBB- | RASQSVSTTFLA | 1197 | GSSNRAT | 1237 | QQYHSSPSWT | 1277 |
| C1978-C7 | | | | | | |
| BCMA_EBB- | RASQSISSYLN | 1198 | AASSLQS | 1238 | QQSYSTPYS | 1278 |
| C1978-D10 | | | | | | |
| BCMA_EBB- | RATQSIGSSFLA | 1199 | GASQRAT | 1239 | QHYESSPSWT | 1279 |
| C1979-C12 | | | | | | |
| BCMA_EBB- | RASQSVSSSYLA | 1200 | GASSRAT | 1240 | QQYGSPPRFT | 1280 |
| C1980-G4 | | | | | | |
| BCMA_EBB- | RASQSVSSSYLA | 1201 | GASSRAT | 1241 | QHYGSSPSWT | 1281 |
| C1980-D2 | | | | | | |
| BCMA_EBB- | RASQRVASNYLA | 1202 | GASSRAT | 1242 | QHYDSSPSWT | 1282 |
| C1978-A10 | | | | | | |
| BCMA_EBB- | RASQSLSSNFLA | 1203 | GASNWAT | 1243 | QYYGTSPMYT | 1283 |
| C1978-D4 | | | | | | |
| BCMA_EBB- | RSSQSLLHSNGYNYL | 1204 | LGSNRAS | 1244 | MQALQTPLT | 1284 |
| C1980-A2 | D | | | | | |
| BCMA_EBB- | RASQSVSSSYLA | 1205 | GTSSRAT | 1245 | QHYGNSPPKFT | 1285 |
| C1981-C3 | | | | | | |
| BCMA_EBB- | RASQSVASSFLA | 1206 | GASGRAT | 1246 | QHYGGSPRLT | 1286 |
| C1978-G4 | | | | | | |
| A7D12.2 | RASQDVNTAVS | 1207 | SASYRYT | 1247 | QQHYSTPWT | 1287 |
| C11D5.3 | RASESVSVIGAHLIH | 1208 | LASNLET | 1248 | LQSRIFPRT | 1288 |
| C12A3.2 | RASESVTILGSHLIY | 1209 | LASNVQT | 1249 | LQSRTIPRT | 1289 |
| C13F12.1 | RASESVTILGSHLIY | 1210 | LASNVQT | 1250 | LQSRTIPRT | 1290 |

TABLE 5
Additional exemplary BCMA CAR sequences

| Name | SEQ ID NO: |
|---|---|
| A7D12.2 VH | 255 |
| A7D12.2 VL | 259 |
| A7D12.2 scFv domain | 263 |
| A7D12.2 Full CART | 267 |
| C11D5.3 VH | 256 |
| C11D5.3 VL | 260 |
| C11D5.3 scFv domain | 264 |
| C11D5.3 Full CART | 268 |
| C12A3.2 VH | 257 |
| C12A3.2 VL | 261 |
| C12A3.2 scFv domain | 265 |
| C12A3.2 Full CART | 269 |
| C13F12.1 VH | 258 |
| C13F12.1 VL | 262 |
| C13F12.1 scFv domain | 266 |
| C13F12.1 Full CART | 270 |

### RNA Transfection

[0632] Disclosed herein are methods for producing an in vitro transcribed RNA CAR. The present invention also includes a CAR encoding RNA construct that can be directly transfected into a cell. A method for generating mRNA for use in transfection can involve in vitro transcription (IVT) of a template with specially designed primers, followed by polyA addition, to produce a construct containing 3′ and 5′ untranslated sequence (“UTR”), a 5′ cap and/or Internal Ribosome Entry Site (IRES), the nucleic acid to be expressed, and a polyA tail, typically 50-2000 bases (SEQ ID NO: 2025) in length. RNA so produced can efficiently transfect different kinds of cells. In one aspect, the template includes sequences for the CAR.

[0633] In one aspect the anti-BCMA CAR is encoded by a messenger RNA (mRNA). In one aspect the mRNA encoding the anti-BCMA CAR is introduced into an immune effector cell, e.g., a T cell or a NK cell, for production of a CAR-expressing cell (e.g., CART cell or CAR-expressing NK cell).

[0634] In one embodiment, the in vitro transcribed RNA CAR can be introduced to a cell as a form of transient transfection. The RNA is produced by in vitro transcription using a polymerase chain reaction (PCR)-generated template. DNA of interest from any source can be directly converted by PCR into a template for in vitro mRNA synthesis using appropriate primers and RNA polymerase. The source of the DNA can be, for example, genomic DNA, plasmid DNA, phage DNA, cDNA, synthetic DNA sequence or any other appropriate source of DNA. The desired temple for in vitro transcription is a CAR of the present invention. For example, the template for the RNA CAR comprises an extracellular region comprising a single chain variable domain of an anti-tumor antibody; a hinge region, a transmembrane domain (e.g., a transmembrane domain of CD8a); and a cytoplasmic region that includes an intracellular signaling domain, e.g., comprising the signaling domain of CD3-zeta and the signaling domain of 4-1BB.

[0635] In one embodiment, the DNA to be used for PCR contains an open reading frame. The DNA can be from a naturally occurring DNA sequence from the genome of an organism. In one embodiment, the nucleic acid can include some or all of the 5′ and/or 3′ untranslated regions (UTRs). The nucleic acid can include exons and introns. In one embodiment, the DNA to be used for PCR is a human nucleic acid sequence. In another embodiment, the DNA to be used for PCR is a human nucleic acid sequence including the 5′ and 3′ UTRs. The DNA can alternatively be an artificial DNA sequence that is not normally expressed in a naturally occurring organism. An exemplary artificial DNA sequence is one that contains portions of genes that are ligated together to form an open reading frame that encodes a fusion protein. The portions of DNA that are ligated together can be from a single organism or from more than one organism.

[0636] PCR is used to generate a template for in vitro transcription of mRNA which is used for transfection. Methods for performing PCR are well known in the art. Primers for use in PCR are designed to have regions that are substantially complementary to regions of the DNA to be used as a template for the PCR. “Substantially complementary,” as used herein, refers to sequences of nucleotides where a majority or all of the bases in the primer sequence are complementary, or one or more bases are non-complementary, or mismatched. Substantially complementary sequences are able to anneal or hybridize with the intended DNA target under annealing conditions used for PCR. The primers can be designed to be substantially complementary to any portion of the DNA template. For example, the primers can be designed to amplify the portion of a nucleic acid that is normally transcribed in cells (the open reading frame), including 5′ and 3′ UTRs. The primers can also be designed to amplify a portion of a nucleic acid that encodes a particular domain of interest. In one embodiment, the primers are designed to amplify the coding region of a human cDNA, including all or portions of the 5′ and 3′ UTRs. Primers useful for PCR can be generated by synthetic methods that are well known in the art. “Forward primers” are primers that contain a region of nucleotides that are substantially complementary to nucleotides on the DNA template that are upstream of the DNA sequence that is to be amplified. “Upstream” is used herein to refer to a location 5, to the DNA sequence to be amplified relative to the coding strand. “Reverse primers” are primers that contain a region of nucleotides that are substantially complementary to a double-stranded DNA template that are downstream of the DNA sequence that is to be amplified. “Downstream” is used herein to refer to a location 3′ to the DNA sequence to be amplified relative to the coding strand.

[0637] Any DNA polymerase useful for PCR can be used in the methods disclosed herein. The reagents and polymerase are commercially available from a number of sources.

[0638] Chemical structures with the ability to promote stability and/or translation efficiency may also be used. The RNA preferably has 5′ and 3′ UTRs. In one embodiment, the 5′ UTR is between one and 3000 nucleotides in length. The length of 5′ and 3′ UTR sequences to be added to the coding region can be altered by different methods, including, but not limited to, designing primers for PCR that anneal to different regions of the UTRs. Using this approach, one of ordinary skill in the art can modify the 5′ and 3′ UTR lengths required to achieve optimal translation efficiency following transfection of the transcribed RNA.

[0639] The 5′ and 3′ UTRs can be the naturally occurring, endogenous 5′ and 3′ UTRs for the nucleic acid of interest. Alternatively, UTR sequences that are not endogenous to the nucleic acid of interest can be added by incorporating the UTR sequences into the forward and reverse primers or by any other modifications of the template. The use of UTR sequences that are not endogenous to the nucleic acid of interest can be useful for modifying the stability and/or translation efficiency of the RNA. For example, it is known that AU-rich elements in 3′ UTR sequences can decrease the stability of mRNA. Therefore, 3′ UTRs can be selected or designed to increase the stability of the transcribed RNA based on properties of UTRs that are well known in the art.

[0640] In one embodiment, the 5′ UTR can contain the Kozak sequence of the endogenous nucleic acid. Alternatively, when a 5′ UTR that is not endogenous to the nucleic acid of interest is being added by PCR as described above, a consensus Kozak sequence can be redesigned by adding the 5′ UTR sequence. Kozak sequences can increase the efficiency of translation of some RNA transcripts, but does not appear to be required for all RNAs to enable efficient translation. The requirement for Kozak sequences for many mRNAs is known in the art. In other embodiments the 5′ UTR can be 5′UTR of an RNA virus whose RNA genome is stable in cells. In other embodiments various nucleotide analogues can be used in the 3′ or 5′ UTR to impede exonuclease degradation of the mRNA.

[0641] To enable synthesis of RNA from a DNA template without the need for gene cloning, a promoter of transcription should be attached to the DNA template upstream of the sequence to be transcribed. When a sequence that functions as a promoter for an RNA polymerase is added to the 5′ end of the forward primer, the RNA polymerase promoter becomes incorporated into the PCR product upstream of the open reading frame that is to be transcribed. In one preferred embodiment, the promoter is a T7 polymerase promoter, as described elsewhere herein. Other useful promoters include, but are not limited to, T3 and SP6 RNA polymerase promoters. Consensus nucleotide sequences for T7, T3 and SP6 promoters are known in the art.

[0642] In a preferred embodiment, the mRNA has both a cap on the 5′ end and a 3′ poly(A) tail which determine ribosome binding, initiation of translation and stability mRNA in the cell. On a circular DNA template, for instance, plasmid DNA, RNA polymerase produces a long concatameric product which is not suitable for expression in eukaryotic cells. The transcription of plasmid DNA linearized at the end of the 3′ UTR results in normal sized mRNA which is not effective in eukaryotic transfection even if it is polyadenylated after transcription.

[0643] On a linear DNA template, phage T7 RNA polymerase can extend the 3′ end of the transcript beyond the last base of the template (Schenborn and Mierendorf, Nuc Acids Res., 13:6223-36 (1985); Nacheva and Berzal-Herranz, Eur. J. Biochem., 270:1485-65 (2003).

[0644] The conventional method of integration of polyA/T stretches into a DNA template is molecular cloning. However polyA/T sequence integrated into plasmid DNA can cause plasmid instability, which is why plasmid DNA templates obtained from bacterial cells are often highly contaminated with deletions and other aberrations. This makes cloning procedures not only laborious and time consuming but often not reliable. That is why a method which allows construction of DNA templates with polyA/T 3′ stretch without cloning highly desirable.

[0645] The polyA/T segment of the transcriptional DNA template can be produced during PCR by using a reverse primer containing a polyT tail, such as 100T tail (SEQ ID NO: 2026) (size can be 50-5000 T (SEQ ID NO: 2027)), or after PCR by any other method, including, but not limited to, DNA ligation or in vitro recombination. Poly(A) tails also provide stability to RNAs and reduce their degradation. Generally, the length of a poly(A) tail positively correlates with the stability of the transcribed RNA. In one embodiment, the poly(A) tail is between 100 and 5000 adenosines (SEQ ID NO: 2028).

[0646] Poly(A) tails of RNAs can be further extended following in vitro transcription with the use of a poly(A) polymerase, such as E. coli polyA polymerase (E-PAP). In one embodiment, increasing the length of a poly(A) tail from 100 nucleotides to between 300 and 400 nucleotides (SEQ ID NO: 2024) results in about a two-fold increase in the translation efficiency of the RNA. Additionally, the attachment of different chemical groups to the 3′ end can increase mRNA stability. Such attachment can contain modified/artificial nucleotides, aptamers and other compounds. For example, ATP analogs can be incorporated into the poly(A) tail using poly(A) polymerase. ATP analogs can further increase the stability of the RNA.

[0647] 5′ caps on also provide stability to RNA molecules. In a preferred embodiment, RNAs produced by the methods disclosed herein include a 5′ cap. The 5′ cap is provided using techniques known in the art and described herein (Cougot, et al., Trends in Biochem. Sci., 29:436-444 (2001); Stepinski, et al., RNA, 7:1468-95 (2001); Elango, et al., Biochim. Biophys. Res. Commun., 330:958-966 (2005)).

[0648] The RNAs produced by the methods disclosed herein can also contain an internal ribosome entry site (IRES) sequence. The IRES sequence may be any viral, chromosomal or artificially designed sequence which initiates cap-independent ribosome binding to mRNA and facilitates the initiation of translation. Any solutes suitable for cell electroporation, which can contain factors facilitating cellular permeability and viability such as sugars, peptides, lipids, proteins, antioxidants, and surfactants can be included.

[0649] RNA can be introduced into target cells using any of a number of different methods, for instance, commercially available methods which include, but are not limited to, electroporation (Amaxa Nucleofector-II (Amaxa Biosystems, Cologne, Germany)), (ECM 830 (BTX) (Harvard Instruments, Boston, Mass.) or the Gene Pulser II (BioRad, Denver, Colo.), Multiporator (Eppendort, Hamburg Germany), cationic liposome mediated transfection using lipofection, polymer encapsulation, peptide mediated transfection, or biolistic particle delivery systems such as “gene guns” (see, for example, Nishikawa, et al. Hum Gene Ther., 12(8):861-70 (2001).

[0650] Non-Viral Delivery Methods

[0651] In some aspects, non-viral methods can be used to deliver a nucleic acid encoding a CAR described herein into a cell or tissue or a subject.

[0652] In some embodiments, the non-viral method includes the use of a transposon (also called a transposable element). In some embodiments, a transposon is a piece of DNA that can insert itself at a location in a genome, for example, a piece of DNA that is capable of self-replicating and inserting its copy into a genome, or a piece of DNA that can be spliced out of a longer nucleic acid and inserted into another place in a genome. For example, a transposon comprises a DNA sequence made up of inverted repeats flanking genes for transposition.

[0653] Exemplary methods of nucleic acid delivery using a transposon include a Sleeping Beauty transposon system (SBTS) and a piggyBac (PB) transposon system. See, e.g., Aronovich et al. Hum. Mol. Genet. 20.R1(2011):R14-20; Singh et al. Cancer Res. 15(2008):2961-2971; Huang et al. Mol. Ther. 16(2008):580-589; Grabundzija et al. Mol. Ther. 18(2010):1200-1209; Kebriaei et al. Blood. 122.21(2013):166; Williams Molecular Therapy 16.9(2008):1515-16; Bell et al. Nat. Protoc. 2.12(2007):3153-65; and Ding et al. Cell. 122.3(2005):473-83, all of which are incorporated herein by reference.

[0654] The SBTS includes two components: 1) a transposon containing a transgene and 2) a source of transposase enzyme. The transposase can transpose the transposon from a carrier plasmid (or other donor DNA) to a target DNA, such as a host cell chromosome/genome. For example, the transposase binds to the carrier plasmid/donor DNA, cuts the transposon (including transgene(s)) out of the plasmid, and inserts it into the genome of the host cell. See, e.g., Aronovich et al. supra.

[0655] Exemplary transposons include a pT2-based transposon. See, e.g., Grabundzija et al. Nucleic Acids Res. 41.3(2013):1829-47; and Singh et al. Cancer Res. 68.8(2008): 2961-2971, all of which are incorporated herein by reference. Exemplary transposases include a Tcl/mariner-type transposase, e.g., the SB10 transposase or the SB11 transposase (a hyperactive transposase which can be expressed, e.g., from a cytomegalovirus promoter). See, e.g., Aronovich et al.; Kebriaei et al.; and Grabundzija et al., all of which are incorporated herein by reference.

[0656] Use of the SBTS permits efficient integration and expression of a transgene, e.g., a nucleic acid encoding a CAR described herein. Provided herein are methods of generating a cell, e.g., T cell or NK cell, that stably expresses a CAR described herein, e.g., using a transposon system such as SBTS.

[0657] In accordance with methods described herein, in some embodiments, one or more nucleic acids, e.g., plasmids, containing the SBTS components are delivered to a cell (e.g., T or NK cell). For example, the nucleic acid(s) are delivered by standard methods of nucleic acid (e.g., plasmid DNA) delivery, e.g., methods described herein, e.g., electroporation, transfection, or lipofection. In some embodiments, the nucleic acid contains a transposon comprising a transgene, e.g., a nucleic acid encoding a CAR described herein. In some embodiments, the nucleic acid contains a transposon comprising a transgene (e.g., a nucleic acid encoding a CAR described herein) as well as a nucleic acid sequence encoding a transposase enzyme. In other embodiments, a system with two nucleic acids is provided, e.g., a dual-plasmid system, e.g., where a first plasmid contains a transposon comprising a transgene, and a second plasmid contains a nucleic acid sequence encoding a transposase enzyme. For example, the first and the second nucleic acids are co-delivered into a host cell.

[0658] In some embodiments, cells, e.g., T or NK cells, are generated that express a CAR described herein by using a combination of gene insertion using the SBTS and genetic editing using a nuclease (e.g., Zinc finger nucleases (ZFNs), Transcription Activator-Like Effector Nucleases (TALENs), the CRISPR/Cas system, or engineered meganuclease re-engineered homing endonucleases).

[0659] In some embodiments, use of a non-viral method of delivery permits reprogramming of cells, e.g., T or NK cells, and direct infusion of the cells into a subject. Advantages of non-viral vectors include but are not limited to the ease and relatively low cost of producing sufficient amounts required to meet a patient population, stability during storage, and lack of immunogenicity.

### Nucleic Acid Constructs Encoding a CAR

[0660] The present invention also provides nucleic acid molecules encoding one or more CAR constructs described herein. In one aspect, the nucleic acid molecule is provided as a messenger RNA transcript. In one aspect, the nucleic acid molecule is provided as a DNA construct.

[0661] Accordingly, in one aspect, the invention pertains to an isolated nucleic acid molecule encoding a chimeric antigen receptor (CAR), wherein the CAR comprises an antigen binding domain, a transmembrane domain, and an intracellular signaling domain comprising a stimulatory domain, e.g., a costimulatory signaling domain and/or a primary signaling domain, e.g., zeta chain.

[0662] The nucleic acid sequences coding for the desired molecules can be obtained using recombinant methods known in the art, such as, for example by screening libraries from cells expressing the gene, by deriving the gene from a vector known to include the same, or by isolating directly from cells and tissues containing the same, using standard techniques. Alternatively, the gene of interest can be produced synthetically, rather than cloned.

[0663] The present invention also provides vectors in which a DNA of the present invention is inserted. Vectors derived from retroviruses such as the lentivirus are suitable tools to achieve long-term gene transfer since they allow long-term, stable integration of a transgene and its propagation in daughter cells. Lentiviral vectors have the added advantage over vectors derived from onco-retroviruses such as murine leukemia viruses in that they can transduce non-proliferating cells, such as hepatocytes. They also have the added advantage of low immunogenicity. A retroviral vector may also be, e.g., a gammaretroviral vector. A gammaretroviral vector may include, e.g., a promoter, a packaging signal (w), a primer binding site (PBS), one or more (e.g., two) long terminal repeats (LTR), and a transgene of interest, e.g., a gene encoding a CAR. A gammaretroviral vector may lack viral structural gens such as gag, pol, and env. Exemplary gammaretroviral vectors include Murine Leukemia Virus (MLV), Spleen-Focus Forming Virus (SFFV), and Myeloproliferative Sarcoma Virus (MPSV), and vectors derived therefrom. Other gammaretroviral vectors are described, e.g., in Tobias Maetzig et al., “Gammaretroviral Vectors: Biology, Technology and Application” Viruses. 2011 June; 3(6): 677-713.

[0664] In another embodiment, the vector comprising the nucleic acid encoding the desired CAR of the invention is an adenoviral vector (A5/35). In another embodiment, the expression of nucleic acids encoding CARs can be accomplished using of transposons such as sleeping beauty, CRISPR, CAS9, and zinc finger nucleases. See below June et al. 2009 Nature Reviews Immunology 9.10: 704-716, is incorporated herein by reference.

[0665] In brief summary, the expression of natural or synthetic nucleic acids encoding CARs is typically achieved by operably linking a nucleic acid encoding the CAR polypeptide or portions thereof to a promoter, and incorporating the construct into an expression vector. The vectors can be suitable for replication and integration eukaryotes. Typical cloning vectors contain transcription and translation terminators, initiation sequences, and promoters useful for regulation of the expression of the desired nucleic acid sequence.

[0666] The expression constructs of the present invention may also be used for nucleic acid immunization and gene therapy, using standard gene delivery protocols. Methods for gene delivery are known in the art. See, e.g., U.S. Pat. Nos. 5,399,346, 5,580,859, 5,589,466, incorporated by reference herein in their entireties. In another embodiment, the invention provides a gene therapy vector.

[0667] The nucleic acid can be cloned into a number of types of vectors. For example, the nucleic acid can be cloned into a vector including, but not limited to a plasmid, a phagemid, a phage derivative, an animal virus, and a cosmid. Vectors of particular interest include expression vectors, replication vectors, probe generation vectors, and sequencing vectors.

[0668] Further, the expression vector may be provided to a cell in the form of a viral vector. Viral vector technology is well known in the art and is described, for example, in Sambrook et al., 2012, MOLECULAR CLONING: A LABORATORY MANUAL, volumes 1-4, Cold Spring Harbor Press, NY), and in other virology and molecular biology manuals. Viruses, which are useful as vectors include, but are not limited to, retroviruses, adenoviruses, adeno-associated viruses, herpes viruses, and lentiviruses. In general, a suitable vector contains an origin of replication functional in at least one organism, a promoter sequence, convenient restriction endonuclease sites, and one or more selectable markers, (e.g., WO 01/96584; WO 01/29058; and U.S. Pat. No. 6,326,193).

[0669] A number of viral based systems have been developed for gene transfer into mammalian cells. For example, retroviruses provide a convenient platform for gene delivery systems. A selected gene can be inserted into a vector and packaged in retroviral particles using techniques known in the art. The recombinant virus can then be isolated and delivered to cells of the subject either in vivo or ex vivo. A number of retroviral systems are known in the art. In some embodiments, adenovirus vectors are used. A number of adenovirus vectors are known in the art. In one embodiment, lentivirus vectors are used.

[0670] Additional promoter elements, e.g., enhancers, regulate the frequency of transcriptional initiation. Typically, these are located in the region 30-110 bp upstream of the start site, although a number of promoters have been shown to contain functional elements downstream of the start site as well. The spacing between promoter elements frequently is flexible, so that promoter function is preserved when elements are inverted or moved relative to one another. In the thymidine kinase (tk) promoter, the spacing between promoter elements can be increased to 50 bp apart before activity begins to decline. Depending on the promoter, it appears that individual elements can function either cooperatively or independently to activate transcription.

[0671] An example of a promoter that is capable of expressing a CAR transgene in a mammalian T cell is the EF1a promoter. The native EF1a promoter drives expression of the alpha subunit of the elongation factor-1 complex, which is responsible for the enzymatic delivery of aminoacyl tRNAs to the ribosome. The EF1a promoter has been extensively used in mammalian expression plasmids and has been shown to be effective in driving CAR expression from transgenes cloned into a lentiviral vector. See, e.g., Milone et al., Mol. Ther. 17(8): 1453-1464 (2009).

[0672] Another example of a promoter is the immediate early cytomegalovirus (CMV) promoter sequence. This promoter sequence is a strong constitutive promoter sequence capable of driving high levels of expression of any polynucleotide sequence operatively linked thereto. However, other constitutive promoter sequences may also be used, including, but not limited to the simian virus 40 (SV40) early promoter, mouse mammary tumor virus (MMTV), human immunodeficiency virus (HIV) long terminal repeat (LTR) promoter, MoMuLV promoter, an avian leukemia virus promoter, an Epstein-Barr virus immediate early promoter, a Rous sarcoma virus promoter, as well as human gene promoters such as, but not limited to, the actin promoter, the myosin promoter, the elongation factor-1α promoter, the hemoglobin promoter, and the creatine kinase promoter. Further, the invention should not be limited to the use of constitutive promoters. Inducible promoters are also contemplated as part of the invention. The use of an inducible promoter provides a molecular switch capable of turning on expression of the polynucleotide sequence which it is operatively linked when such expression is desired, or turning off the expression when expression is not desired. Examples of inducible promoters include, but are not limited to a metallothionine promoter, a glucocorticoid promoter, a progesterone promoter, and a tetracycline promoter.

[0673] Another example of a promoter is the phosphoglycerate kinase (PGK) promoter. In embodiments, a truncated PGK promoter (e.g., a PGK promoter with one or more, e.g., 1, 2, 5, 10, 100, 200, 300, or 400, nucleotide deletions when compared to the wild-type PGK promoter sequence) may be desired. The nucleotide sequences of exemplary PGK promoters are provided below.

### WT PGK Promoter

(SEQ ID NO: 1291)
ACCCCTCTCTCCAGCCACTAAGCCAGTTGCTCCCTCGGCTGACGGCTGC
ACGCGAGGCCTCCGAACGTCTTACGCCTTGTGGCGCGCCCGTCCTTGTC
CCGGGTGTGATGGCGGGGTGTGGGGCGGAGGGCGTGGCGGGGAAGGGCC
GGCGACGAGAGCCGCGCGGGACGACTCGTCGGCGATAACCGGTGTCGGG
TAGCGCCAGCCGCGCGACGGTAACGAGGGACCGCGACAGGCAGACGCTC
CCATGATCACTCTGCACGCCGAAGGCAAATAGTGCAGGCCGTGCGGCGC
TTGGCGTTCCTTGGAAGGGCTGAATCCCCGCCTCGTCCTTCGCAGCGGC
CCCCCGGGTGTTCCCATCGCCGCTTCTAGGCCCACTGCGACGCTTGCCT
GCACTTCTTACACGCTCTGGGTCCCAGCCGCGGCGACGCAAAGGGCCTT
GGTGCGGGTCTCGTCGGCGCAGGGACGCGTTTGGGTCCCGACGGAACCT
TTTCCGCGTTGGGGTTGGGGCACCATAAGCT

### Exemplary Truncated PGK Promoters:

PGK100:
(SEQ ID NO: 1292)
ACCCCTCTCTCCAGCCACTAAGCCAGTTGCTCCCTCGGCTGACGGCTGCA
CGCGAGGCCTCCGAACGTCTTACGCCTTGTGGCGCGCCCGTCCTTGTCCC
GGGTGTGATGGCGGGGTG
PGK200:
(SEQ ID NO: 1293)
ACCCCTCTCTCCAGCCACTAAGCCAGTTGCTCCCTCGGCTGACGGCTGCA
CGCGAGGCCTCCGAACGTCTTACGCCTTGTGGCGCGCCCGTCCTTGTCCC
GGGTGTGATGGCGGGGTGTGGGGCGGAGGGCGTGGCGGGGAAGGGCCGGC
GACGAGAGCCGCGCGGGACGACTCGTCGGCGATAACCGGTGTCGGGTAGC
GCCAGCCGCGCGACGGTAACG
PGK300:
(SEQ ID NO: 1294)
ACCCCTCTCTCCAGCCACTAAGCCAGTTGCTCCCTCGGCTGACGGCTGCA
CGCGAGGCCTCCGAACGTCTTACGCCTTGTGGCGCGCCCGTCCTTGTCCC
GGGTGTGATGGCGGGGTGTGGGGCGGAGGGCGTGGCGGGGAAGGGCCGGC
GACGAGAGCCGCGCGGGACGACTCGTCGGCGATAACCGGTGTCGGGTAGC
GCCAGCCGCGCGACGGTAACGAGGGACCGCGACAGGCAGACGCTCCCATG
ATCACTCTGCACGCCGAAGGCAAATAGTGCAGGCCGTGCGGCGCTTGGCG
TTCCTTGGAAGGGCTGAATCCCCG
PGK400:
(SEQ ID NO: 1295)
ACCCCTCTCTCCAGCCACTAAGCCAGTTGCTCCCTCGGCTGACGGCTGCA
CGCGAGGCCTCCGAACGTCTTACGCCTTGTGGCGCGCCCGTCCTTGTCCC
GGGTGTGATGGCGGGGTGTGGGGCGGAGGGCGTGGCGGGGAAGGGCCGGC
GACGAGAGCCGCGCGGGACGACTCGTCGGCGATAACCGGTGTCGGGTAGC
GCCAGCCGCGCGACGGTAACGAGGGACCGCGACAGGCAGACGCTCCCATG
ATCACTCTGCACGCCGAAGGCAAATAGTGCAGGCCGTGCGGCGCTTGGCG
TTCCTTGGAAGGGCTGAATCCCCGCCTCGTCCTTCGCAGCGGCCCCCCGG
GTGTTCCCATCGCCGCTTCTAGGCCCACTGCGACGCTTGCCTGCACTTCT
TACACGCTCTGGGTCCCAGCCG

[0676] A vector may also include, e.g., a signal sequence to facilitate secretion, a polyadenylation signal and transcription terminator (e.g., from Bovine Growth Hormone (BGH) gene), an element allowing episomal replication and replication in prokaryotes (e.g. SV40 origin and ColE1 or others known in the art) and/or elements to allow selection (e.g., ampicillin resistance gene and/or zeocin marker).

[0677] In order to assess the expression of a CAR polypeptide or portions thereof, the expression vector to be introduced into a cell can also contain either a selectable marker gene or a reporter gene or both to facilitate identification and selection of expressing cells from the population of cells sought to be transfected or infected through viral vectors. In other aspects, the selectable marker may be carried on a separate piece of DNA and used in a co-transfection procedure. Both selectable markers and reporter genes may be flanked with appropriate regulatory sequences to enable expression in the host cells. Useful selectable markers include, for example, antibiotic-resistance genes, such as neo and the like.

[0678] Reporter genes are used for identifying potentially transfected cells and for evaluating the functionality of regulatory sequences. In general, a reporter gene is a gene that is not present in or expressed by the recipient organism or tissue and that encodes a polypeptide whose expression is manifested by some easily detectable property, e.g., enzymatic activity. Expression of the reporter gene is assayed at a suitable time after the DNA has been introduced into the recipient cells. Suitable reporter genes may include genes encoding luciferase, beta-galactosidase, chloramphenicol acetyl transferase, secreted alkaline phosphatase, or the green fluorescent protein gene (e.g., Ui-Tei et al., 2000 FEBS Letters 479: 79-82). Suitable expression systems are well known and may be prepared using known techniques or obtained commercially. In general, the construct with the minimal 5′ flanking region showing the highest level of expression of reporter gene is identified as the promoter. Such promoter regions may be linked to a reporter gene and used to evaluate agents for the ability to modulate promoter-driven transcription.

[0679] In one embodiment, the vector can further comprise a nucleic acid encoding a second CAR. In one embodiment, the second CAR includes an antigen binding domain to a target expressed on acute myeloid leukemia cells, such as, e.g., CD123, CD34, CLL-1, folate receptor beta, or FLT3; or a target expressed on a B cell, e.g., CD10, CD19, CD20, CD22, CD34, CD123, FLT-3, ROR1, CD79b, CD179b, or CD79a. In one embodiment, the vector comprises a nucleic acid sequence encoding a first CAR that specifically binds a first antigen and includes an intracellular signaling domain having a costimulatory signaling domain but not a primary signaling domain, and a nucleic acid encoding a second CAR that specifically binds a second, different, antigen and includes an intracellular signaling domain having a primary signaling domain but not a costimulatory signaling domain. In one embodiment, the vector comprises a nucleic acid encoding a first BCMA CAR that includes a BCMA binding domain, a transmembrane domain and a costimulatory domain and a nucleic acid encoding a second CAR that targets an antigen other than BCMA (e.g., an antigen expressed on AML cells, e.g., CD123, CD34, CLL-1, folate receptor beta, or FLT3; or an antigen expressed on a B cell, e.g., CD10, CD19, CD20, CD22, CD34, CD123, FLT-3, ROR1, CD79b, CD179b, or CD79a) and includes an antigen binding domain, a transmembrane domain and a primary signaling domain. In another embodiment, the vector comprises a nucleic acid encoding a first BCMA CAR that includes a BCMA binding domain, a transmembrane domain and a primary signaling domain and a nucleic acid encoding a second CAR that specifically binds an antigen other than BCMA (e.g., an antigen expressed on AML cells, e.g., CD123, CD34, CLL-1, folate receptor beta, or FLT3; or an antigen expressed on a B cell, e.g., CD10, CD19, CD20, CD22, CD34, CD123, FLT-3, ROR1, CD79b, CD179b, or CD79a) and includes an antigen binding domain to the antigen, a transmembrane domain and a costimulatory signaling domain.

[0680] In one embodiment, the vector comprises a nucleic acid encoding a BCMA CAR described herein and a nucleic acid encoding an inhibitory CAR. In one embodiment, the inhibitory CAR comprises an antigen binding domain that binds an antigen found on normal cells but not cancer cells, e.g., normal cells that also express BCMA. In one embodiment, the inhibitory CAR comprises the antigen binding domain, a transmembrane domain and an intracellular domain of an inhibitory molecule. For example, the intracellular domain of the inhibitory CAR can be an intracellular domain of PD1, PD-L1, PD-L2, CTLA4, TIM3, CEACAM (e.g., CEACAM-1, CEACAM-3 and/or CEACAM-5), LAG3, VISTA, BTLA, TIGIT, LAIR1, CD160, 2B4, CD80, CD86, B7-H3 (CD276), B7-H4 (VTCN1), HVEM (TNFRSF14 or CD270), KIR, A2aR, MHC class I, MHC class II, GALS, adenosine, and TGFR beta.

[0681] In embodiments, the vector may comprise two or more nucleic acid sequences encoding a CAR, e.g., a BCMA CAR described herein and a second CAR, e.g., an inhibitory CAR or a CAR that specifically binds to an antigen other than BCMA (e.g., an antigen expressed on AML cells, e.g., CD123, CLL-1, CD34, FLT3, or folate receptor beta; or antigen expression B cells, e.g., CD10, CD19, CD20, CD22, CD34, CD123, FLT-3, ROR1, CD79b, CD179b, or CD79a). In such embodiments, the two or more nucleic acid sequences encoding the CAR are encoded by a single nucleic molecule in the same frame and as a single polypeptide chain. In this aspect, the two or more CARs, can, e.g., be separated by one or more peptide cleavage sites. (e.g., an auto-cleavage site or a substrate for an intracellular protease). Examples of peptide cleavage sites include the following, wherein the GSG residues are optional:

T2A:
(SEQ ID NO: 1296)
(GSG)EGRGSLLTCGDVEENPGP
P2A:
(SEQ ID NO: 1297)
(GSG)ATNFSLLKQAGDVEENPGP
E2A:
(SEQ ID NO: 1298)
(GSG)QCTNYALLKLAGDVESNPGP
F2A:
(SEQ ID NO: 1299)
(GSG)VKQTLNFDLLKLAGDVESNPGP

[0682] Methods of introducing and expressing genes into a cell are known in the art. In the context of an expression vector, the vector can be readily introduced into a host cell, e.g., mammalian, bacterial, yeast, or insect cell by any method in the art. For example, the expression vector can be transferred into a host cell by physical, chemical, or biological means.

[0683] Physical methods for introducing a polynucleotide into a host cell include calcium phosphate precipitation, lipofection, particle bombardment, microinjection, electroporation, and the like. Methods for producing cells comprising vectors and/or exogenous nucleic acids are well-known in the art. See, for example, Sambrook et al., 2012, MOLECULAR CLONING: A LABORATORY MANUAL, volumes 1-4, Cold Spring Harbor Press, NY). A preferred method for the introduction of a polynucleotide into a host cell is calcium phosphate transfection

[0684] Biological methods for introducing a polynucleotide of interest into a host cell include the use of DNA and RNA vectors. Viral vectors, and especially retroviral vectors, have become the most widely used method for inserting genes into mammalian, e.g., human cells. Other viral vectors can be derived from lentivirus, poxviruses, herpes simplex virus I, adenoviruses and adeno-associated viruses, and the like. See, for example, U.S. Pat. Nos. 5,350,674 and 5,585,362.

[0685] Chemical means for introducing a polynucleotide into a host cell include colloidal dispersion systems, such as macromolecule complexes, nanocapsules, microspheres, beads, and lipid-based systems including oil-in-water emulsions, micelles, mixed micelles, and liposomes. An exemplary colloidal system for use as a delivery vehicle in vitro and in vivo is a liposome (e.g., an artificial membrane vesicle). Other methods of state-of-the-art targeted delivery of nucleic acids are available, such as delivery of polynucleotides with targeted nanoparticles or other suitable sub-micron sized delivery system.

[0686] In the case where a non-viral delivery system is utilized, an exemplary delivery vehicle is a liposome. The use of lipid formulations is contemplated for the introduction of the nucleic acids into a host cell (in vitro, ex vivo or in vivo). In another aspect, the nucleic acid may be associated with a lipid. The nucleic acid associated with a lipid may be encapsulated in the aqueous interior of a liposome, interspersed within the lipid bilayer of a liposome, attached to a liposome via a linking molecule that is associated with both the liposome and the oligonucleotide, entrapped in a liposome, complexed with a liposome, dispersed in a solution containing a lipid, mixed with a lipid, combined with a lipid, contained as a suspension in a lipid, contained or complexed with a micelle, or otherwise associated with a lipid. Lipid, lipid/DNA or lipid/expression vector associated compositions are not limited to any particular structure in solution. For example, they may be present in a bilayer structure, as micelles, or with a “collapsed” structure. They may also simply be interspersed in a solution, possibly forming aggregates that are not uniform in size or shape. Lipids are fatty substances which may be naturally occurring or synthetic lipids. For example, lipids include the fatty droplets that naturally occur in the cytoplasm as well as the class of compounds which contain long-chain aliphatic hydrocarbons and their derivatives, such as fatty acids, alcohols, amines, amino alcohols, and aldehydes.

[0687] Lipids suitable for use can be obtained from commercial sources. For example, dimyristyl phosphatidylcholine (“DMPC”) can be obtained from Sigma, St. Louis, Mo.; dicetyl phosphate (“DCP”) can be obtained from K & K Laboratories (Plainview, N.Y.); cholesterol (“Choi”) can be obtained from Calbiochem-Behring; dimyristyl phosphatidylglycerol (“DMPG”) and other lipids may be obtained from Avanti Polar Lipids, Inc. (Birmingham, Ala.). Stock solutions of lipids in chloroform or chloroform/methanol can be stored at about −20° C. Chloroform is used as the only solvent since it is more readily evaporated than methanol. “Liposome” is a generic term encompassing a variety of single and multilamellar lipid vehicles formed by the generation of enclosed lipid bilayers or aggregates. Liposomes can be characterized as having vesicular structures with a phospholipid bilayer membrane and an inner aqueous medium. Multilamellar liposomes have multiple lipid layers separated by aqueous medium. They form spontaneously when phospholipids are suspended in an excess of aqueous solution. The lipid components undergo self-rearrangement before the formation of closed structures and entrap water and dissolved solutes between the lipid bilayers (Ghosh et al., 1991 Glycobiology 5: 505-10). However, compositions that have different structures in solution than the normal vesicular structure are also encompassed. For example, the lipids may assume a micellar structure or merely exist as nonuniform aggregates of lipid molecules. Also contemplated are lipofectamine-nucleic acid complexes.

[0688] Regardless of the method used to introduce exogenous nucleic acids into a host cell or otherwise expose a cell to the inhibitor of the present invention, in order to confirm the presence of the recombinant DNA sequence in the host cell, a variety of assays may be performed. Such assays include, for example, “molecular biological” assays well known to those of skill in the art, such as Southern and Northern blotting, RT-PCR and PCR; “biochemical” assays, such as detecting the presence or absence of a particular peptide, e.g., by immunological means (ELISAs and Western blots) or by assays described herein to identify agents falling within the scope of the invention.

[0689] The present invention further provides a vector comprising a CAR encoding nucleic acid molecule. In one aspect, a CAR vector can be directly transduced into a cell, e.g., a T cell or NK cell. In one aspect, the vector is a cloning or expression vector, e.g., a vector including, but not limited to, one or more plasmids (e.g., expression plasmids, cloning vectors, minicircles, minivectors, double minute chromosomes), retroviral and lentiviral vector constructs. In one aspect, the vector is capable of expressing the CAR construct in mammalian T cells or NK cells. In one aspect, the mammalian T cell is a human T cell. In one aspect, the mammalian NK cell is a human NK cell.

### Sources of Cells

[0690] Prior to expansion and genetic modification, a source of cells, e.g., immune effector cells (e.g., T cells or NK cells), is obtained from a subject. The term “subject” is intended to include living organisms in which an immune response can be elicited (e.g., mammals). Examples of subjects include humans, dogs, cats, mice, rats, and transgenic species thereof. T cells can be obtained from a number of sources, including peripheral blood mononuclear cells, bone marrow, lymph node tissue, cord blood, thymus tissue, tissue from a site of infection, ascites, pleural effusion, spleen tissue, and tumors.

[0691] In certain aspects of the present invention, any number of immune effector cell (e.g., T cell or NK cell) lines available in the art, may be used. In certain aspects of the present invention, T cells can be obtained from a unit of blood collected from a subject using any number of techniques known to the skilled artisan, such as Ficoll™ separation. In one preferred aspect, cells from the circulating blood of an individual are obtained by apheresis. The apheresis product typically contains lymphocytes, including T cells, monocytes, granulocytes, B cells, other nucleated white blood cells, red blood cells, and platelets. In one aspect, the cells collected by apheresis may be washed to remove the plasma fraction and to place the cells in an appropriate buffer or media for subsequent processing steps. In one aspect of the invention, the cells are washed with phosphate buffered saline (PBS). In an alternative aspect, the wash solution lacks calcium and may lack magnesium or may lack many if not all divalent cations.

[0692] Initial activation steps in the absence of calcium can lead to magnified activation. As those of ordinary skill in the art would readily appreciate a washing step may be accomplished by methods known to those in the art, such as by using a semi-automated “flow-through” centrifuge (for example, the Cobe 2991 cell processor, the Baxter CytoMate, or the Haemonetics Cell Saver 5) according to the manufacturer's instructions. After washing, the cells may be resuspended in a variety of biocompatible buffers, such as, for example, Ca-free, Mg-free PBS, PlasmaLyte A, or other saline solution with or without buffer. Alternatively, the undesirable components of the apheresis sample may be removed and the cells directly resuspended in culture media.

[0693] It is recognized that the methods of the application can utilize culture media conditions comprising 5% or less, for example 2%, human AB serum, and employ known culture media conditions and compositions, for example those described in Smith et al., “Ex vivo expansion of human T cells for adoptive immunotherapy using the novel Xeno-free CTS Immune Cell Serum Replacement” Clinical & Translational Immunology (2015) 4, e31; doi:10.1038/cti.2014.31.

[0694] In one aspect, T cells are isolated from peripheral blood lymphocytes by lysing the red blood cells and depleting the monocytes, for example, by centrifugation through a PERCOLL™ gradient or by counterflow centrifugal elutriation. A specific subpopulation of T cells, such as CD3+, CD4+, CD8+, CD45RA+, and/or CD45RO+ T cells, can be further isolated by positive or negative selection techniques. For example, in one aspect, T cells are isolated by incubation with anti-CD3/anti-CD28 (e.g., 3×28)-conjugated beads, such as DYNABEADS® M-450 CD3/CD28 T, for a time period sufficient for positive selection of the desired T cells. In one aspect, the time period is about 30 minutes. In a further aspect, the time period ranges from 30 minutes to 36 hours or longer and all integer values there between. In a further aspect, the time period is at least 1, 2, 3, 4, 5, or 6 hours. In yet another preferred aspect, the time period is 10 to 24 hours. In one aspect, the incubation time period is 24 hours. Longer incubation times may be used to isolate T cells in any situation where there are few T cells as compared to other cell types, such in isolating tumor infiltrating lymphocytes (TIL) from tumor tissue or from immunocompromised individuals. Further, use of longer incubation times can increase the efficiency of capture of CD8+ T cells. Thus, by simply shortening or lengthening the time T cells are allowed to bind to the CD3/CD28 beads and/or by increasing or decreasing the ratio of beads to T cells (as described further herein), subpopulations of T cells can be preferentially selected for or against at culture initiation or at other time points during the process. Additionally, by increasing or decreasing the ratio of anti-CD3 and/or anti-CD28 antibodies on the beads or other surface, subpopulations of T cells can be preferentially selected for or against at culture initiation or at other desired time points. The skilled artisan would recognize that multiple rounds of selection can also be used in the context of this invention. In certain aspects, it may be desirable to perform the selection procedure and use the “unselected” cells in the activation and expansion process. “Unselected” cells can also be subjected to further rounds of selection.

[0695] Enrichment of a T cell population by negative selection can be accomplished with a combination of antibodies directed to surface markers unique to the negatively selected cells. One method is cell sorting and/or selection via negative magnetic immunoadherence or flow cytometry that uses a cocktail of monoclonal antibodies directed to cell surface markers present on the cells negatively selected. For example, to enrich for CD4+ cells by negative selection, a monoclonal antibody cocktail typically includes antibodies to CD14, CD20, CD11b, CD16, HLA-DR, and CD8. In certain aspects, it may be desirable to enrich for or positively select for regulatory T cells which typically express CD4+, CD25+, CD62Lhi, GITR+, and FoxP3+. In certain aspects, it may be desirable to enrich for cells that are CD127low. Alternatively, in certain aspects, T regulatory cells are depleted by anti-C25 conjugated beads or other similar method of selection.

[0696] The methods described herein can include, e.g., selection of a specific subpopulation of immune effector cells, e.g., T cells, that are a T regulatory cell-depleted population, CD25+ depleted cells, using, e.g., a negative selection technique, e.g., described herein. Preferably, the population of T regulatory depleted cells contains less than 30%, 25%, 20%, 15%, 10%, 5%, 4%, 3%, 2%, 1% of CD25+ cells.

[0697] In one embodiment, T regulatory cells, e.g., CD25+ T cells, are removed from the population using an anti-CD25 antibody, or fragment thereof, or a CD25-binding ligand, IL-2. In one embodiment, the anti-CD25 antibody, or fragment thereof, or CD25-binding ligand is conjugated to a substrate, e.g., a bead, or is otherwise coated on a substrate, e.g., a bead. In one embodiment, the anti-CD25 antibody, or fragment thereof, is conjugated to a substrate as described herein.

[0698] In one embodiment, the T regulatory cells, e.g., CD25+ T cells, are removed from the population using CD25 depletion reagent from Miltenyi™. In one embodiment, the ratio of cells to CD25 depletion reagent is le7 cells to 20 uL, or 1e7 cells to 15 uL, or 1e7 cells to 10 uL, or 1e7 cells to 5 uL, or 1e7 cells to 2.5 uL, or 1e7 cells to 1.25 uL. In one embodiment, e.g., for T regulatory cells, e.g., CD25+ depletion, greater than 500 million cells/ml is used. In a further aspect, a concentration of cells of 600, 700, 800, or 900 million cells/ml is used.

[0699] In one embodiment, the population of immune effector cells to be depleted includes about 6×10⁹ CD25+ T cells. In other aspects, the population of immune effector cells to be depleted include about 1×10⁹ to 1×10¹⁰ CD25+ T cell, and any integer value in between. In one embodiment, the resulting population T regulatory depleted cells has 2×10⁹T regulatory cells, e.g., CD25+ cells, or less (e.g., 1×10⁹, 5×10⁸, 1×10⁸, 5×10⁷, 1×10⁷, or less CD25+ cells).

[0700] In one embodiment, the T regulatory cells, e.g., CD25+ cells, are removed from the population using the CliniMAC system with a depletion tubing set, such as, e.g., tubing 162-01. In one embodiment, the CliniMAC system is run on a depletion setting such as, e.g., DEPLETION2.1.

[0701] Without wishing to be bound by a particular theory, decreasing the level of negative regulators of immune cells (e.g., decreasing the number of unwanted immune cells, e.g., T_{REG} cells), in a subject prior to apheresis or during manufacturing of a CAR-expressing cell product can reduce the risk of subject relapse. For example, methods of depleting T_{REG} cells are known in the art. Methods of decreasing TREG cells include, but are not limited to, cyclophosphamide, anti-GITR antibody (an anti-GITR antibody described herein), CD25-depletion, and combinations thereof.

[0702] In some embodiments, the manufacturing methods comprise reducing the number of (e.g., depleting) T_{REG} cells prior to manufacturing of the CAR-expressing cell. For example, manufacturing methods comprise contacting the sample, e.g., the apheresis sample, with an anti-GITR antibody and/or an anti-CD25 antibody (or fragment thereof, or a CD25-binding ligand), e.g., to deplete T_{REG} cells prior to manufacturing of the CAR-expressing cell (e.g., T cell, NK cell) product.

[0703] In an embodiment, a subject is pre-treated with one or more therapies that reduce T_{REG} cells prior to collection of cells for CAR-expressing cell product manufacturing, thereby reducing the risk of subject relapse to CAR-expressing cell treatment. In an embodiment, methods of decreasing T_{REG} cells include, but are not limited to, administration to the subject of one or more of cyclophosphamide, anti-GITR antibody, CD25-depletion, or a combination thereof. Administration of one or more of cyclophosphamide, anti-GITR antibody, CD25-depletion, or a combination thereof, can occur before, during or after an infusion of the CAR-expressing cell product.

[0704] In an embodiment, a subject is pre-treated with cyclophosphamide prior to collection of cells for CAR-expressing cell product manufacturing, thereby reducing the risk of subject relapse to CAR-expressing cell treatment. In an embodiment, a subject is pre-treated with an anti-GITR antibody prior to collection of cells for CAR-expressing cell product manufacturing, thereby reducing the risk of subject relapse to CAR-expressing cell treatment.

[0705] In one embodiment, the population of cells to be removed are neither the regulatory T cells or tumor cells, but cells that otherwise negatively affect the expansion and/or function of CART cells, e.g. cells expressing CD14, CD11b, CD33, CD15, or other markers expressed by potentially immune suppressive cells. In one embodiment, such cells are envisioned to be removed concurrently with regulatory T cells and/or tumor cells, or following said depletion, or in another order.

[0706] The methods described herein can include more than one selection step, e.g., more than one depletion step. Enrichment of a T cell population by negative selection can be accomplished, e.g., with a combination of antibodies directed to surface markers unique to the negatively selected cells. One method is cell sorting and/or selection via negative magnetic immunoadherence or flow cytometry that uses a cocktail of monoclonal antibodies directed to cell surface markers present on the cells negatively selected. For example, to enrich for CD4+ cells by negative selection, a monoclonal antibody cocktail can include antibodies to CD14, CD20, CD11b, CD16, HLA-DR, and CD8.

[0707] The methods described herein can further include removing cells from the population which express a tumor antigen, e.g., a tumor antigen that does not comprise CD25, e.g., CD19, CD30, CD38, CD123, CD20, CD14 or CD11b, to thereby provide a population of T regulatory depleted, e.g., CD25+ depleted, and tumor antigen depleted cells that are suitable for expression of a CAR, e.g., a CAR described herein. In one embodiment, tumor antigen expressing cells are removed simultaneously with the T regulatory, e.g., CD25+ cells. For example, an anti-CD25 antibody, or fragment thereof, and an anti-tumor antigen antibody, or fragment thereof, can be attached to the same substrate, e.g., bead, which can be used to remove the cells or an anti-CD25 antibody, or fragment thereof, or the anti-tumor antigen antibody, or fragment thereof, can be attached to separate beads, a mixture of which can be used to remove the cells. In other embodiments, the removal of T regulatory cells, e.g., CD25+ cells, and the removal of the tumor antigen expressing cells is sequential, and can occur, e.g., in either order.

[0708] Also provided are methods that include removing cells from the population which express a check point inhibitor, e.g., a check point inhibitor described herein, e.g., one or more of PD1+ cells, LAG3+ cells, and TIM3+ cells, to thereby provide a population of T regulatory depleted, e.g., CD25+ depleted cells, and check point inhibitor depleted cells, e.g., PD1+, LAG3+ and/or TIM3+ depleted cells. Exemplary check point inhibitors include PD1, PD-L1, PD-L2, CTLA4, TIM3, CEACAM (e.g., CEACAM-1, CEACAM-3 and/or CEACAM-5), LAG3, VISTA, BTLA, TIGIT, LAIR1, CD160, 2B4, CD80, CD86, B7-H3 (CD276), B7-H4 (VTCN1), HVEM (TNFRSF14 or CD270), KIR, A2aR, MHC class I, MHC class II, GALS, adenosine, and TGFR beta. In embodiments, the checkpoint inhibitor is PD1 or PD-L1. In one embodiment, check point inhibitor expressing cells are removed simultaneously with the T regulatory, e.g., CD25+ cells. For example, an anti-CD25 antibody, or fragment thereof, and an anti-check point inhibitor antibody, or fragment thereof, can be attached to the same bead which can be used to remove the cells, or an anti-CD25 antibody, or fragment thereof, and the anti-check point inhibitor antibody, or fragment there, can be attached to separate beads, a mixture of which can be used to remove the cells. In other embodiments, the removal of T regulatory cells, e.g., CD25+ cells, and the removal of the check point inhibitor expressing cells is sequential, and can occur, e.g., in either order.

[0709] In one embodiment, a T cell population can be selected that expresses one or more of IFN-γ, TNFα, IL-17A, IL-2, IL-3, IL-4, GM-CSF, IL-10, IL-13, granzyme B, and perform, or other appropriate molecules, e.g., other cytokines. Methods for screening for cell expression can be determined, e.g., by the methods described in PCT Publication No.: WO 2013/126712.

[0710] For isolation of a desired population of cells by positive or negative selection, the concentration of cells and surface (e.g., particles such as beads) can be varied. In certain aspects, it may be desirable to significantly decrease the volume in which beads and cells are mixed together (e.g., increase the concentration of cells), to ensure maximum contact of cells and beads. For example, in one aspect, a concentration of 2 billion cells/ml is used. In one aspect, a concentration of 1 billion cells/ml is used. In a further aspect, greater than 100 million cells/ml is used. In a further aspect, a concentration of cells of 10, 15, 20, 25, 30, 35, 40, 45, or 50 million cells/ml is used. In yet one aspect, a concentration of cells from 75, 80, 85, 90, 95, or 100 million cells/ml is used. In further aspects, concentrations of 125 or 150 million cells/ml can be used. Using high concentrations can result in increased cell yield, cell activation, and cell expansion. Further, use of high cell concentrations allows more efficient capture of cells that may weakly express target antigens of interest, such as CD28-negative T cells, or from samples where there are many tumor cells present (e.g., leukemic blood, tumor tissue, etc.). Such populations of cells may have therapeutic value and would be desirable to obtain. For example, using high concentration of cells allows more efficient selection of CD8+ T cells that normally have weaker CD28 expression.

[0711] In a related aspect, it may be desirable to use lower concentrations of cells. By significantly diluting the mixture of T cells and surface (e.g., particles such as beads), interactions between the particles and cells is minimized. This selects for cells that express high amounts of desired antigens to be bound to the particles. For example, CD4+ T cells express higher levels of CD28 and are more efficiently captured than CD8+ T cells in dilute concentrations. In one aspect, the concentration of cells used is 5×10e6/ml. In other aspects, the concentration used can be from about 1×10⁵/ml to 1×10⁶/ml, and any integer value in between.

[0712] In other aspects, the cells may be incubated on a rotator for varying lengths of time at varying speeds at either 2-10° C. or at room temperature.

[0713] T cells for stimulation can also be frozen after a washing step. Wishing not to be bound by theory, the freeze and subsequent thaw step provides a more uniform product by removing granulocytes and to some extent monocytes in the cell population. After the washing step that removes plasma and platelets, the cells may be suspended in a freezing solution. While many freezing solutions and parameters are known in the art and will be useful in this context, one method involves using PBS containing 20% DMSO and 8% human serum albumin, or culture media containing 10% Dextran 40 and 5% Dextrose, 20% Human Serum Albumin and 7.5% DMSO, or 31.25% Plasmalyte-A, 31.25% Dextrose 5%, 0.45% NaCl, 10% Dextran 40 and 5% Dextrose, 20% Human Serum Albumin, and 7.5% DMSO or other suitable cell freezing media containing for example, Hespan and PlasmaLyte A, the cells then are frozen to −80° C. at a rate of 1° per minute and stored in the vapor phase of a liquid nitrogen storage tank. Other methods of controlled freezing may be used as well as uncontrolled freezing immediately at −20° C. or in liquid nitrogen.

[0714] In certain aspects, cryopreserved cells are thawed and washed as described herein and allowed to rest for one hour at room temperature prior to activation using the methods of the present invention.

[0715] Also contemplated in the context of the invention is the collection of blood samples or apheresis product from a subject at a time period prior to when the expanded cells as described herein might be needed. As such, the source of the cells to be expanded can be collected at any time point necessary, and desired cells, such as immune effector cells, e.g., T cells or NK cells, isolated and frozen for later use in cell therapy, e.g., T cell therapy, for any number of diseases or conditions that would benefit from cell therapy, e.g., T cell therapy, such as those described herein. In one aspect a blood sample or an apheresis is taken from a generally healthy subject. In certain aspects, a blood sample or an apheresis is taken from a generally healthy subject who is at risk of developing a disease, but who has not yet developed a disease, and the cells of interest are isolated and frozen for later use. In certain aspects, the immune effector cells (e.g., T cells or NK cells) may be expanded, frozen, and used at a later time. In certain aspects, samples are collected from a patient shortly after diagnosis of a particular disease as described herein but prior to any treatments. In a further aspect, the cells are isolated from a blood sample or an apheresis from a subject prior to any number of relevant treatment modalities, including but not limited to treatment with agents such as natalizumab, efalizumab, antiviral agents, chemotherapy, radiation, immunosuppressive agents, such as cyclosporin, azathioprine, methotrexate, mycophenolate, and FK506, antibodies, or other immunoablative agents such as CAMPATH, anti-CD3 antibodies, cytoxan, fludarabine, cyclosporin, FK506, rapamycin, mycophenolic acid, steroids, FR901228, and irradiation.

[0716] In a further aspect of the present invention, T cells are obtained from a patient directly following treatment that leaves the subject with functional T cells. In this regard, it has been observed that following certain cancer treatments, in particular treatments with drugs that damage the immune system, shortly after treatment during the period when patients would normally be recovering from the treatment, the quality of T cells obtained may be optimal or improved for their ability to expand ex vivo. Likewise, following ex vivo manipulation using the methods described herein, these cells may be in a preferred state for enhanced engraftment and in vivo expansion. Thus, it is contemplated within the context of the present invention to collect blood cells, including T cells, dendritic cells, or other cells of the hematopoietic lineage, during this recovery phase. Further, in certain aspects, mobilization (for example, mobilization with GM-CSF) and conditioning regimens can be used to create a condition in a subject wherein repopulation, recirculation, regeneration, and/or expansion of particular cell types is favored, especially during a defined window of time following therapy. Illustrative cell types include T cells, B cells, dendritic cells, and other cells of the immune system.

[0717] In one embodiment, the immune effector cells expressing a CAR molecule, e.g., a CAR molecule described herein, are obtained from a subject that has received a low, immune enhancing dose of an mTOR inhibitor. In an embodiment, the population of immune effector cells, e.g., T cells, to be engineered to express a CAR, are harvested after a sufficient time, or after sufficient dosing of the low, immune enhancing, dose of an mTOR inhibitor, such that the level of PD1 negative immune effector cells, e.g., T cells, or the ratio of PD1 negative immune effector cells, e.g., T cells/PD1 positive immune effector cells, e.g., T cells, in the subject or harvested from the subject has been, at least transiently, increased.

[0718] In other embodiments, population of immune effector cells, e.g., T cells, which have, or will be engineered to express a CAR, can be treated ex vivo by contact with an amount of an mTOR inhibitor that increases the number of PD1 negative immune effector cells, e.g., T cells or increases the ratio of PD1 negative immune effector cells, e.g., T cells/PD1 positive immune effector cells, e.g., T cells.

[0719] In one embodiment, a T cell population is diaglycerol kinase (DGK)-deficient. DGK-deficient cells include cells that do not express DGK RNA or protein, or have reduced or inhibited DGK activity. DGK-deficient cells can be generated by genetic approaches, e.g., administering RNA-interfering agents, e.g., siRNA, shRNA, miRNA, to reduce or prevent DGK expression. Alternatively, DGK-deficient cells can be generated by treatment with DGK inhibitors described herein.

[0720] In one embodiment, a T cell population is Ikaros-deficient. Ikaros-deficient cells include cells that do not express Ikaros RNA or protein, or have reduced or inhibited Ikaros activity, Ikaros-deficient cells can be generated by genetic approaches, e.g., administering RNA-interfering agents, e.g., siRNA, shRNA, miRNA, to reduce or prevent Ikaros expression. Alternatively, Ikaros-deficient cells can be generated by treatment with Ikaros inhibitors, e.g., lenalidomide.

[0721] In embodiments, a T cell population is DGK-deficient and Ikaros-deficient, e.g., does not express DGK and Ikaros, or has reduced or inhibited DGK and Ikaros activity. Such DGK and Ikaros-deficient cells can be generated by any of the methods described herein.

[0722] In an embodiment, the NK cells are obtained from the subject. In another embodiment, the NK cells are an NK cell line, e.g., NK-92 cell line (Conkwest).

### Modifications of CAR Cells, Including Allogeneic CAR Cells

[0723] In embodiments described herein, the immune effector cell can be an allogeneic immune effector cell, e.g., T cell or NK cell. For example, the cell can be an allogeneic T cell, e.g., an allogeneic T cell lacking expression of a functional T cell receptor (TCR) and/or human leukocyte antigen (HLA), e.g., HLA class I and/or HLA class II, and/or beta-2 microglobulin (β₂m). Compositions of allogeneic CAR and methods thereof have been described in, e.g., pages 227-237 of WO 2016/014565, incorporated herein by reference in its entirety.

[0724] In some embodiments, a cell, e.g., a T cell or a NK cell, is modified to reduce the expression of a TCR, and/or HLA, and/or β₂m, and/or an inhibitory molecule described herein (e.g., PD1, PD-L1, PD-L2, CTLA4, TIM3, CEACAM (e.g., CEACAM-1, CEACAM-3 and/or CEACAM-5), LAG3, VISTA, BTLA, TIGIT, LAIR1, CD160, 2B4, CD80, CD86, B7-H3 (CD276), B7-H4 (VTCN1), HVEM (TNFRSF14 or CD270), KIR, A2aR, MHC class I, MHC class II, GALS, adenosine, and TGFR beta), using, e.g., a method described herein, e.g., siRNA, shRNA, clustered regularly interspaced short palindromic repeats (CRISPR) transcription-activator like effector nuclease (TALEN), or zinc finger endonuclease (ZFN).

[0725] In some embodiments, a cell, e.g., a T cell or a NK cell is engineered to express a telomerase subunit, e.g., the catalytic subunit of telomerase, e.g., TERT, e.g., hTERT. In one embodiment, such modification improves persistence of the cell in a patient.

### Activation and Expansion of T Cells

[0726] T cells may be activated and expanded generally using methods as described, for example, in U.S. Pat. Nos. 6,352,694; 6,534,055; 6,905,680; 6,692,964; 5,858,358; 6,887,466; 6,905,681; 7,144,575; 7,067,318; 7,172,869; 7,232,566; 7,175,843; 5,883,223; 6,905,874; 6,797,514; 6,867,041; and U.S. Patent Application Publication No. 20060121005.

[0727] Generally, the T cells of the invention may be expanded by contact with a surface having attached thereto an agent that stimulates a CD3/TCR complex associated signal and a ligand that stimulates a costimulatory molecule on the surface of the T cells. In particular, T cell populations may be stimulated as described herein, such as by contact with an anti-CD3 antibody, or antigen-binding fragment thereof, or an anti-CD2 antibody immobilized on a surface, or by contact with a protein kinase C activator (e.g., bryostatin) in conjunction with a calcium ionophore. For co-stimulation of an accessory molecule on the surface of the T cells, a ligand that binds the accessory molecule is used. For example, a population of T cells can be contacted with an anti-CD3 antibody and an anti-CD28 antibody, under conditions appropriate for stimulating proliferation of the T cells. To stimulate proliferation of either CD4+ T cells or CD8+ T cells, an anti-CD3 antibody and an anti-CD28 antibody can be used. Examples of an anti-CD28 antibody include 9.3, B-T3, XR-CD28 (Diaclone, Besancon, France) can be used as can other methods commonly known in the art (Berg et al., Transplant Proc. 30(8):3975-3977, 1998; Haanen et al., J. Exp. Med. 190(9):13191328, 1999; Garland et al, J. Immunol Meth. 227(1-2):53-63, 1999).

[0728] In certain aspects, the primary stimulatory signal and the costimulatory signal for the T cell may be provided by different protocols. For example, the agents providing each signal may be in solution or coupled to a surface. When coupled to a surface, the agents may be coupled to the same surface (i.e., in “cis” formation) or to separate surfaces (i.e., in “trans” formation). Alternatively, one agent may be coupled to a surface and the other agent in solution. In one aspect, the agent providing the costimulatory signal is bound to a cell surface and the agent providing the primary activation signal is in solution or coupled to a surface. In certain aspects, both agents can be in solution. In one aspect, the agents may be in soluble form, and then cross-linked to a surface, such as a cell expressing Fc receptors or an antibody or other binding agent which will bind to the agents. In this regard, see for example, U.S. Patent Application Publication Nos. 20040101519 and 20060034810 for artificial antigen presenting cells (aAPCs) that are contemplated for use in activating and expanding T cells in the present invention.

[0729] In one aspect, the two agents are immobilized on beads, either on the same bead, i.e., “cis,” or to separate beads, i.e., “trans.” By way of example, the agent providing the primary activation signal is an anti-CD3 antibody or an antigen-binding fragment thereof and the agent providing the costimulatory signal is an anti-CD28 antibody or antigen-binding fragment thereof; and both agents are co-immobilized to the same bead in equivalent molecular amounts. In one aspect, a 1:1 ratio of each antibody bound to the beads for CD4+ T cell expansion and T cell growth is used. In certain aspects of the present invention, a ratio of anti CD3:CD28 antibodies bound to the beads is used such that an increase in T cell expansion is observed as compared to the expansion observed using a ratio of 1:1. In one particular aspect an increase of from about 1 to about 3 fold is observed as compared to the expansion observed using a ratio of 1:1. In one aspect, the ratio of CD3:CD28 antibody bound to the beads ranges from 100:1 to 1:100 and all integer values there between. In one aspect of the present invention, more anti-CD28 antibody is bound to the particles than anti-CD3 antibody, i.e., the ratio of CD3:CD28 is less than one. In certain aspects of the invention, the ratio of anti CD28 antibody to anti CD3 antibody bound to the beads is greater than 2:1. In one particular aspect, a 1:100 CD3:CD28 ratio of antibody bound to beads is used. In one aspect, a 1:75 CD3:CD28 ratio of antibody bound to beads is used. In a further aspect, a 1:50 CD3:CD28 ratio of antibody bound to beads is used. In one aspect, a 1:30 CD3:CD28 ratio of antibody bound to beads is used. In one preferred aspect, a 1:10 CD3:CD28 ratio of antibody bound to beads is used. In one aspect, a 1:3 CD3:CD28 ratio of antibody bound to the beads is used. In yet one aspect, a 3:1 CD3:CD28 ratio of antibody bound to the beads is used.

[0730] Ratios of particles to cells from 1:500 to 500:1 and any integer values in between may be used to stimulate T cells or other target cells. As those of ordinary skill in the art can readily appreciate, the ratio of particles to cells may depend on particle size relative to the target cell. For example, small sized beads could only bind a few cells, while larger beads could bind many. In certain aspects the ratio of cells to particles ranges from 1:100 to 100:1 and any integer values in-between and in further aspects the ratio comprises 1:9 to 9:1 and any integer values in between, can also be used to stimulate T cells. The ratio of anti-CD3- and anti-CD28-coupled particles to T cells that result in T cell stimulation can vary as noted above, however certain preferred values include 1:100, 1:50, 1:40, 1:30, 1:20, 1:10, 1:9, 1:8, 1:7, 1:6, 1:5, 1:4, 1:3, 1:2, 1:1, 2:1, 3:1, 4:1, 5:1, 6:1, 7:1, 8:1, 9:1, 10:1, and 15:1 with one preferred ratio being at least 1:1 particles per T cell. In one aspect, a ratio of particles to cells of 1:1 or less is used. In one particular aspect, a preferred particle: cell ratio is 1:5. In further aspects, the ratio of particles to cells can be varied depending on the day of stimulation. For example, in one aspect, the ratio of particles to cells is from 1:1 to 10:1 on the first day and additional particles are added to the cells every day or every other day thereafter for up to 10 days, at final ratios of from 1:1 to 1:10 (based on cell counts on the day of addition). In one particular aspect, the ratio of particles to cells is 1:1 on the first day of stimulation and adjusted to 1:5 on the third and fifth days of stimulation. In one aspect, particles are added on a daily or every other day basis to a final ratio of 1:1 on the first day, and 1:5 on the third and fifth days of stimulation. In one aspect, the ratio of particles to cells is 2:1 on the first day of stimulation and adjusted to 1:10 on the third and fifth days of stimulation. In one aspect, particles are added on a daily or every other day basis to a final ratio of 1:1 on the first day, and 1:10 on the third and fifth days of stimulation. One of skill in the art will appreciate that a variety of other ratios may be suitable for use in the present invention. In particular, ratios will vary depending on particle size and on cell size and type. In one aspect, the most typical ratios for use are in the neighborhood of 1:1, 2:1 and 3:1 on the first day.

[0731] In further aspects of the present invention, the cells, such as T cells, are combined with agent-coated beads, the beads and the cells are subsequently separated, and then the cells are cultured. In an alternative aspect, prior to culture, the agent-coated beads and cells are not separated but are cultured together. In a further aspect, the beads and cells are first concentrated by application of a force, such as a magnetic force, resulting in increased ligation of cell surface markers, thereby inducing cell stimulation.

[0732] By way of example, cell surface proteins may be ligated by allowing paramagnetic beads to which anti-CD3 and anti-CD28 are attached (3×28 beads) to contact the T cells. In one aspect the cells (for example, 10⁴ to 10⁹ T cells) and beads (for example, DYNABEADS® M-450 CD3/CD28 T paramagnetic beads at a ratio of 1:1) are combined in a buffer, for example PBS (without divalent cations such as, calcium and magnesium). Again, those of ordinary skill in the art can readily appreciate any cell concentration may be used. For example, the target cell may be very rare in the sample and comprise only 0.01% of the sample or the entire sample (i.e., 100%) may comprise the target cell of interest. Accordingly, any cell number is within the context of the present invention. In certain aspects, it may be desirable to significantly decrease the volume in which particles and cells are mixed together (i.e., increase the concentration of cells), to ensure maximum contact of cells and particles. For example, in one aspect, a concentration of about 10 billion cells/ml, 9 billion/ml, 8 billion/ml, 7 billion/ml, 6 billion/ml, 5 billion/ml, or 2 billion cells/ml is used. In one aspect, greater than 100 million cells/ml is used. In a further aspect, a concentration of cells of 10, 15, 20, 25, 30, 35, 40, 45, or 50 million cells/ml is used. In yet one aspect, a concentration of cells from 75, 80, 85, 90, 95, or 100 million cells/ml is used. In further aspects, concentrations of 125 or 150 million cells/ml can be used. Using high concentrations can result in increased cell yield, cell activation, and cell expansion. Further, use of high cell concentrations allows more efficient capture of cells that may weakly express target antigens of interest, such as CD28-negative T cells. Such populations of cells may have therapeutic value and would be desirable to obtain in certain aspects. For example, using high concentration of cells allows more efficient selection of CD8+ T cells that normally have weaker CD28 expression.

[0733] In one embodiment, cells transduced with a nucleic acid encoding a CAR, e.g., a CAR described herein, are expanded, e.g., by a method described herein. In one embodiment, the cells are expanded in culture for a period of several hours (e.g., about 2, 3, 4, 5, 6, 7, 8, 9, 10, 15, 18, 21 hours) to about 14 days (e.g., 1, 2, 3, 4, 5, 6, 7, 8, 9, 10, 11, 12, 13 or 14 days). In one embodiment, the cells are expanded for a period of 4 to 9 days. In one embodiment, the cells are expanded for a period of 8 days or less, e.g., 7, 6 or 5 days. In one embodiment, the cells, e.g., a BCMA CAR cell described herein, are expanded in culture for 5 days, and the resulting cells are more potent than the same cells expanded in culture for 9 days under the same culture conditions. Potency can be defined, e.g., by various T cell functions, e.g. proliferation, target cell killing, cytokine production, activation, migration, or combinations thereof. In one embodiment, the cells, e.g., a BCMA CAR cell described herein, expanded for 5 days show at least a one, two, three or four fold increase in cells doublings upon antigen stimulation as compared to the same cells expanded in culture for 9 days under the same culture conditions. In one embodiment, the cells, e.g., the cells expressing a BCMA CAR described herein, are expanded in culture for 5 days, and the resulting cells exhibit higher proinflammatory cytokine production, e.g., IFN-γ and/or GM-CSF levels, as compared to the same cells expanded in culture for 9 days under the same culture conditions. In one embodiment, the cells, e.g., a BCMA CAR cell described herein, expanded for 5 days show at least a one, two, three, four, five, ten fold or more increase in pg/ml of proinflammatory cytokine production, e.g., IFN-γ and/or GM-CSF levels, as compared to the same cells expanded in culture for 9 days under the same culture conditions.

[0734] In one aspect of the present invention, the mixture may be cultured for several hours (about 3 hours) to about 14 days or any hourly integer value in between. In one aspect, the mixture may be cultured for 21 days. In one aspect of the invention the beads and the T cells are cultured together for about eight days. In one aspect, the beads and T cells are cultured together for 2-3 days. Several cycles of stimulation may also be desired such that culture time of T cells can be 60 days or more. Conditions appropriate for T cell culture include an appropriate media (e.g., Minimal Essential Media or RPMI Media 1640 or, X-vivo 15, (Lonza)) that may contain factors necessary for proliferation and viability, including serum (e.g., fetal bovine or human serum), interleukin-2 (IL-2), insulin, IFN-γ, IL-4, IL-7, GM-CSF, IL-10, IL-12, IL-15, TGFβ, and TNF-α or any other additives for the growth of cells known to the skilled artisan. Other additives for the growth of cells include, but are not limited to, surfactant, plasmanate, and reducing agents such as N-acetyl-cysteine and 2-mercaptoethanol. Media can include RPMI 1640, AIM-V, DMEM, MEM, α-MEM, F-12, X-Vivo 15, and X-Vivo 20, Optimizer, with added amino acids, sodium pyruvate, and vitamins, either serum-free or supplemented with an appropriate amount of serum (or plasma) or a defined set of hormones, and/or an amount of cytokine(s) sufficient for the growth and expansion of T cells. Antibiotics, e.g., penicillin and streptomycin, are included only in experimental cultures, not in cultures of cells that are to be infused into a subject. The target cells are maintained under conditions necessary to support growth, for example, an appropriate temperature (e.g., 37° C.) and atmosphere (e.g., air plus 5% CO₂).

[0735] In one embodiment, the cells are expanded in an appropriate media (e.g., media described herein) that includes one or more interleukin that result in at least a 200-fold (e.g., 200-fold, 250-fold, 300-fold, 350-fold) increase in cells over a 14 day expansion period, e.g., as measured by a method described herein such as flow cytometry. In one embodiment, the cells are expanded in the presence of IL-15 and/or IL-7 (e.g., IL-15 and IL-7).

[0736] In embodiments, methods described herein, e.g., CAR-expressing cell manufacturing methods, comprise removing T regulatory cells, e.g., CD25+ T cells, from a cell population, e.g., using an anti-CD25 antibody, or fragment thereof, or a CD25-binding ligand, IL-2. Methods of removing T regulatory cells, e.g., CD25+ T cells, from a cell population are described herein. In embodiments, the methods, e.g., manufacturing methods, further comprise contacting a cell population (e.g., a cell population in which T regulatory cells, such as CD25+ T cells, have been depleted; or a cell population that has previously contacted an anti-CD25 antibody, fragment thereof, or CD25-binding ligand) with IL-15 and/or IL-7. For example, the cell population (e.g., that has previously contacted an anti-CD25 antibody, fragment thereof, or CD25-binding ligand) is expanded in the presence of IL-15 and/or IL-7.

[0737] In some embodiments a CAR-expressing cell described herein is contacted with a composition comprising a interleukin-15 (IL-15) polypeptide, a interleukin-15 receptor alpha (IL-15Rα) polypeptide, or a combination of both a IL-15 polypeptide and a IL-15Ra polypeptide e.g., hetIL-15, during the manufacturing of the CAR-expressing cell, e.g., ex vivo. In embodiments, a CAR-expressing cell described herein is contacted with a composition comprising a IL-15 polypeptide during the manufacturing of the CAR-expressing cell, e.g., ex vivo. In embodiments, a CAR-expressing cell described herein is contacted with a composition comprising a combination of both a IL-15 polypeptide and a IL-15 Ra polypeptide during the manufacturing of the CAR-expressing cell, e.g., ex vivo. In embodiments, a CAR-expressing cell described herein is contacted with a composition comprising hetIL-15 during the manufacturing of the CAR-expressing cell, e.g., ex vivo.

[0738] In one embodiment the CAR-expressing cell described herein is contacted with a composition comprising hetIL-15 during ex vivo expansion. In an embodiment, the CAR-expressing cell described herein is contacted with a composition comprising an IL-15 polypeptide during ex vivo expansion. In an embodiment, the CAR-expressing cell described herein is contacted with a composition comprising both an IL-15 polypeptide and an IL-15Ra polypeptide during ex vivo expansion. In one embodiment the contacting results in the survival and proliferation of a lymphocyte subpopulation, e.g., CD8+ T cells.

[0739] T cells that have been exposed to varied stimulation times may exhibit different characteristics. For example, typical blood or apheresed peripheral blood mononuclear cell products have a helper T cell population (TH, CD4+) that is greater than the cytotoxic or suppressor T cell population. Ex vivo expansion of T cells by stimulating CD3 and CD28 receptors produces a population of T cells that prior to about days 8-9 consists predominately of TH cells, while after about days 8-9, the population of T cells comprises an increasingly greater population of TC cells. Accordingly, depending on the purpose of treatment, infusing a subject with a T cell population comprising predominately of TH cells may be advantageous. Similarly, if an antigen-specific subset of TC cells has been isolated it may be beneficial to expand this subset to a greater degree.

[0740] Further, in addition to CD4 and CD8 markers, other phenotypic markers vary significantly, but in large part, reproducibly during the course of the cell expansion process. Thus, such reproducibility enables the ability to tailor an activated T cell product for specific purposes.

[0741] Once a BCMA CAR is constructed, various assays can be used to evaluate the activity of the molecule, such as but not limited to, the ability to expand T cells following antigen stimulation, sustain T cell expansion in the absence of re-stimulation, and anti-cancer activities in appropriate in vitro and animal models. Assays to evaluate the effects of a BCMA CAR are described in further detail below

[0742] Western blot analysis of CAR expression in primary T cells can be used to detect the presence of monomers and dimers. See, e.g., Milone et al., Molecular Therapy 17(8): 1453-1464 (2009). Very briefly, T cells (1:1 mixture of CD4⁺ and CD8⁺ T cells) expressing the CARs are expanded in vitro for more than 10 days followed by lysis and SDS-PAGE under reducing conditions. CARs containing the full length TCR-ζ cytoplasmic domain and the endogenous TCR-ζ chain are detected by western blotting using an antibody to the TCR-ζ chain. The same T cell subsets are used for SDS-PAGE analysis under non-reducing conditions to permit evaluation of covalent dimer formation.

[0743] In vitro expansion of CAR⁺ T cells following antigen stimulation can be measured by flow cytometry. For example, a mixture of CD4⁺ and CD8⁺ T cells are stimulated with αCD3/αCD28 aAPCs followed by transduction with lentiviral vectors expressing GFP under the control of the promoters to be analyzed. Exemplary promoters include the CMV IE gene, EF-1α, ubiquitin C, or phosphoglycerokinase (PGK) promoters. GFP fluorescence is evaluated on day 6 of culture in the CD4⁺ and/or CD8⁺ T cell subsets by flow cytometry. See, e.g., Milone et al., Molecular Therapy 17(8): 1453-1464 (2009). Alternatively, a mixture of CD4⁺ and CD8⁺ T cells are stimulated with αCD3/αCD28 coated magnetic beads on day 0, and transduced with CAR on day 1 using a bicistronic lentiviral vector expressing CAR along with eGFP using a 2A ribosomal skipping sequence. Cultures are re-stimulated with BCMA-expressing cells, such as multiple myeloma cell lines or K562-BCMA, following washing. Exogenous IL-2 is added to the cultures every other day at 100 IU/ml. GFP⁺ T cells are enumerated by flow cytometry using bead-based counting. See, e.g., Milone et al., Molecular Therapy 17(8): 1453-1464 (2009).

[0744] Sustained CAR⁺ T cell expansion in the absence of re-stimulation can also be measured. See, e.g., Milone et al., Molecular Therapy 17(8): 1453-1464 (2009). Briefly, mean T cell volume (fl) is measured on day 8 of culture using a Coulter Multisizer III particle counter, a Nexcelom Cellometer Vision or Millipore Scepter, following stimulation with αCD3/αCD28 coated magnetic beads on day 0, and transduction with the indicated CAR on day 1.

[0745] Animal models can also be used to measure a CART activity. For example, xenograft model using human BCMA-specific CAR⁺ T cells to treat a primary human multiple myeloma in immunodeficient mice can be used. See, e.g., Milone et al., Molecular Therapy 17(8): 1453-1464 (2009). Very briefly, after establishment of MM, mice are randomized as to treatment groups. Different numbers of BCMA CART cells can be injected into immunodeficient mice bearing MM. Animals are assessed for disease progression and tumor burden at weekly intervals. Survival curves for the groups are compared using the log-rank test. In addition, absolute peripheral blood CD4⁺ and CD8⁺ T cell counts 4 weeks following T cell injection in the immunodeficient mice can also be analyzed. Mice are injected with multiple myeloma cells and 3 weeks later are injected with T cells engineered to express BCMA CAR, e.g., by a bicistronic lentiviral vector that encodes the CAR linked to eGFP. T cells are normalized to 45-50% input GFP⁺ T cells by mixing with mock-transduced cells prior to injection, and confirmed by flow cytometry. Animals are assessed for leukemia at 1-week intervals. Survival curves for the CAR⁺ T cell groups are compared using the log-rank test.

[0746] Assessment of cell proliferation and cytokine production has been previously described, e.g., at Milone et al., Molecular Therapy 17(8): 1453-1464 (2009). Briefly, assessment of CAR-mediated proliferation is performed in microtiter plates by mixing washed T cells with K562 cells expressing BCMA or other BCMA-expressing myeloma cells are irradiated with gamma-radiation prior to use. Anti-CD3 (clone OKT3) and anti-CD28 (clone 9.3) monoclonal antibodies are added to cultures with KT32-BBL cells to serve as a positive control for stimulating T-cell proliferation since these signals support long-term CD8⁺ T cell expansion ex vivo. T cells are enumerated in cultures using CountBright™ fluorescent beads (Invitrogen, Carlsbad, Calif.) and flow cytometry as described by the manufacturer. CAR⁺ T cells are identified by GFP expression using T cells that are engineered with eGFP-2A linked CAR-expressing lentiviral vectors. For CAR+ T cells not expressing GFP, the CAR+ T cells are detected with biotinylated recombinant BCMA protein and a secondary avidin-PE conjugate. CD4+ and CD8⁺ expression on T cells are also simultaneously detected with specific monoclonal antibodies (BD Biosciences). Cytokine measurements are performed on supernatants collected 24 hours following re-stimulation using the human TH1/TH2 cytokine cytometric bead array kit (BD Biosciences, San Diego, Calif.) according the manufacturer's instructions. Fluorescence is assessed using a FACScalibur flow cytometer, and data is analyzed according to the manufacturer's instructions.

[0747] Cytotoxicity can be assessed by a standard 51Cr-release assay. See, e.g., Milone et al., Molecular Therapy 17(8): 1453-1464 (2009). Briefly, target cells (e.g., K562 lines expressing BCMA and primary multiple myeloma cells) are loaded with 51Cr (as NaCrO4, New England Nuclear, Boston, Mass.) at 37° C. for 2 hours with frequent agitation, washed twice in complete RPMI and plated into microtiter plates. Effector T cells are mixed with target cells in the wells in complete RPMI at varying ratios of effector cell:target cell (E:T). Additional wells containing media only (spontaneous release, SR) or a 1% solution of triton-X 100 detergent (total release, TR) are also prepared. After 4 hours of incubation at 37° C., supernatant from each well is harvested. Released 51Cr is then measured using a gamma particle counter (Packard Instrument Co., Waltham, Mass.). Each condition is performed in at least triplicate, and the percentage of lysis is calculated using the formula: % Lysis=(ER−SR)/(TR−SR), where ER represents the average 51Cr released for each experimental condition. Alternatively, cytotoxicity can also be assessed using a Bright-Glo™ Luciferase Assay.

[0748] Imaging technologies can be used to evaluate specific trafficking and proliferation of CARs in tumor-bearing animal models. Such assays have been described, for example, in Barrett et al., Human Gene Therapy 22:1575-1586 (2011). Briefly, NOD/SCID/γc^{-/-} (NSG) mice or other immunodeficient are injected IV with multiple myeloma cells followed 7 days later with BCMA CART cells 4 hour after electroporation with the CAR constructs. The T cells are stably transfected with a lentiviral construct to express firefly luciferase, and mice are imaged for bioluminescence. Alternatively, therapeutic efficacy and specificity of a single injection of CAR⁺ T cells in a multiple myeloma xenograft model can be measured as the following: NSG mice are injected with multiple myeloma cells transduced to stably express firefly luciferase, followed by a single tail-vein injection of T cells electroporated with BCMA CAR construct days later. Animals are imaged at various time points post injection. For example, photon-density heat maps of firefly luciferasepositive tumors in representative mice at day 5 (2 days before treatment) and day 8 (24 hr post CAR+PBLs) can be generated.

[0749] Alternatively, or in combination to the methods disclosed herein, methods and compositions for one or more of: detection and/or quantification of CAR-expressing cells (e.g., in vitro or in vivo (e.g., clinical monitoring)); immune cell expansion and/or activation; and/or CAR-specific selection, that involve the use of a CAR ligand, are disclosed. In one exemplary embodiment, the CAR ligand is an antibody that binds to the CAR molecule, e.g., binds to the extracellular antigen binding domain of CAR (e.g., an antibody that binds to the antigen binding domain, e.g., an anti-idiotypic antibody; or an antibody that binds to a constant region of the extracellular binding domain) In other embodiments, the CAR ligand is a CAR antigen molecule (e.g., a CAR antigen molecule as described herein).

[0750] In one aspect, a method for detecting and/or quantifying CAR-expressing cells is disclosed. For example, the CAR ligand can be used to detect and/or quantify CAR-expressing cells in vitro or in vivo (e.g., clinical monitoring of CAR-expressing cells in a patient, or dosing a patient). The method includes:

[0751] providing the CAR ligand (optionally, a labelled CAR ligand, e.g., a CAR ligand that includes a tag, a bead, a radioactive or fluorescent label);

[0752] acquiring the CAR-expressing cell (e.g., acquiring a sample containing CAR-expressing cells, such as a manufacturing sample or a clinical sample);

[0753] contacting the CAR-expressing cell with the CAR ligand under conditions where binding occurs, thereby detecting the level (e.g., amount) of the CAR-expressing cells present. Binding of the CAR-expressing cell with the CAR ligand can be detected using standard techniques such as FACS, ELISA and the like.

[0754] In another aspect, a method of expanding and/or activating cells (e g, immune effector cells) is disclosed. The method includes:

[0755] providing a CAR-expressing cell (e.g., a first CAR-expressing cell or a transiently expressing CAR cell);

[0756] contacting said CAR-expressing cell with a CAR ligand, e.g., a CAR ligand as described herein), under conditions where immune cell expansion and/or proliferation occurs, thereby producing the activated and/or expanded cell population.

[0757] In certain embodiments, the CAR ligand is present on (e.g., is immobilized or attached to a substrate, e.g., a non-naturally occurring substrate). In some embodiments, the substrate is a non-cellular substrate. The non-cellular substrate can be a solid support chosen from, e.g., a plate (e.g., a microtiter plate), a membrane (e.g., a nitrocellulose membrane), a matrix, a chip or a bead. In embodiments, the CAR ligand is present in the substrate (e.g., on the substrate surface). The CAR ligand can be immobilized, attached, or associated covalently or non-covalently (e.g., cross-linked) to the substrate. In one embodiment, the CAR ligand is attached (e.g., covalently attached) to a bead. In the aforesaid embodiments, the immune cell population can be expanded in vitro or ex vivo. The method can further include culturing the population of immune cells in the presence of the ligand of the CAR molecule, e.g., using any of the methods described herein.

[0758] In other embodiments, the method of expanding and/or activating the cells further comprises addition of a second stimulatory molecule, e.g., CD28. For example, the CAR ligand and the second stimulatory molecule can be immobilized to a substrate, e.g., one or more beads, thereby providing increased cell expansion and/or activation.

[0759] In yet another aspect, a method for selecting or enriching for a CAR expressing cell is provided. The method includes contacting the CAR expressing cell with a CAR ligand as described herein; and selecting the cell on the basis of binding of the CAR ligand.

[0760] In yet other embodiments, a method for depleting, reducing and/or killing a CAR expressing cell is provided. The method includes contacting the CAR expressing cell with a CAR ligand as described herein; and targeting the cell on the basis of binding of the CAR ligand, thereby reducing the number, and/or killing, the CAR-expressing cell. In one embodiment, the CAR ligand is coupled to a toxic agent (e.g., a toxin or a cell ablative drug). In another embodiment, the anti-idiotypic antibody can cause effector cell activity, e.g., ADCC or ADC activities.

[0761] Exemplary anti-CAR antibodies that can be used in the methods disclosed herein are described, e.g., in WO 2014/190273 and by Jena et al., “Chimeric Antigen Receptor (CAR)-Specific Monoclonal Antibody to Detect CD19-Specific T cells in Clinical Trials”, PLOS March 2013 8:3 e57838, the contents of which are incorporated by reference. In one embodiment, the anti-idiotypic antibody molecule recognizes an anti-CD19 antibody molecule, e.g., an anti-CD19 scFv. For instance, the anti-idiotypic antibody molecule can compete for binding with the CD19-specific CAR mAb clone no. 136.20.1 described in Jena et al., PLOS March 2013 8:3 e57838; may have the same CDRs (e.g., one or more of, e.g., all of, VH CDR1, VH CDR2, CH CDR3, VL CDR1, VL CDR2, and VL CDR3, using the Kabat definition, the Chothia definition, or a combination of the Kabat and Chothia definitions) as the CD19-specific CAR mAb clone no. 136.20.1; may have one or more (e.g., 2) variable regions as the CD19-specific CAR mAb clone no. 136.20.1, or may comprise the CD19-specific CAR mAb clone no. 136.20.1. In some embodiments, the anti-idiotypic antibody was made according to a method described in Jena et al. In another embodiment, the anti-idiotypic antibody molecule is an anti-idiotypic antibody molecule described in WO 2014/190273. In some embodiments, the anti-idiotypic antibody molecule has the same CDRs (e.g., one or more of, e.g., all of, VH CDR1, VH CDR2, CH CDR3, VL CDR1, VL CDR2, and VL CDR3) as an antibody molecule of WO 2014/190273 such as 136.20.1; may have one or more (e.g., 2) variable regions of an antibody molecule of WO 2014/190273, or may comprise an antibody molecule of WO 2014/190273 such as 136.20.1. In other embodiments, the anti-CAR antibody binds to a constant region of the extracellular binding domain of the CAR molecule, e.g., as described in WO 2014/190273. In some embodiments, the anti-CAR antibody binds to a constant region of the extracellular binding domain of the CAR molecule, e.g., a heavy chain constant region (e.g., a CH2-CH3 hinge region) or light chain constant region. For instance, in some embodiments the anti-CAR antibody competes for binding with the 2D3 monoclonal antibody described in WO 2014/190273, has the same CDRs (e.g., one or more of, e.g., all of, VH CDR1, VH CDR2, CH CDR3, VL CDR1, VL CDR2, and VL CDR3) as 2D3, or has one or more (e.g., 2) variable regions of 2D3, or comprises 2D3 as described in WO 2014/190273.

[0762] In some aspects and embodiments, the compositions and methods herein are optimized for a specific subset of T cells, e.g., as described in U.S. Ser. No. 62/031,699 filed Jul. 31, 2014, the contents of which are incorporated herein by reference in their entirety. In some embodiments, the optimized subsets of T cells display an enhanced persistence compared to a control T cell, e.g., a T cell of a different type (e.g., CD8⁺ or CD4⁺) expressing the same construct.

[0763] In some embodiments, a CD4⁺ T cell comprises a CAR described herein, which CAR comprises an intracellular signaling domain suitable for (e.g., optimized for, e.g., leading to enhanced persistence in) a CD4⁺ T cell, e.g., an ICOS domain. In some embodiments, a CD8⁺ T cell comprises a CAR described herein, which CAR comprises an intracellular signaling domain suitable for (e.g., optimized for, e.g., leading to enhanced persistence of) a CD8⁺ T cell, e.g., a 4-1BB domain, a CD28 domain, or another costimulatory domain other than an ICOS domain. In some embodiments, the CAR described herein comprises an antigen binding domain described herein, e.g., a CAR comprising an antigen binding domain that targets BCMA).

[0764] In an aspect, described herein is a method of treating a subject, e.g., a subject having cancer. The method includes administering to said subject, an effective amount of:

[0765] 1) a CD4⁺ T cell comprising a CAR (the CAR^{CD4+})

[0766] comprising:

[0767] an antigen binding domain, e.g., an antigen binding domain described herein, e.g., an antigen binding domain that targets BCMA;

[0768] a transmembrane domain; and

[0769] an intracellular signaling domain, e.g., a first costimulatory domain, e.g., an ICOS domain; and

[0770] 2) a CD8⁺ T cell comprising a CAR (the CAR^{CD8+}) comprising:

[0771] an antigen binding domain, e.g., an antigen binding domain described herein, e.g., an antigen binding domain that targets BCMA;

[0772] a transmembrane domain; and

[0773] an intracellular signaling domain, e.g., a second costimulatory domain, e.g., a 4-1BB domain, a CD28 domain, or another costimulatory domain other than an ICOS domain;

[0774] wherein the CAR^{CD4+} and the CAR^{CD8+} differ from one another.

[0775] Optionally, the method further includes administering:

[0776] 3) a second CD8+ T cell comprising a CAR (the second CAR^{CD8+}) comprising:

[0777] an antigen binding domain, e.g., an antigen binding domain described herein, e.g., an antigen binding domain that specifically binds BCMA;

[0778] a transmembrane domain; and

[0779] an intracellular signaling domain, wherein the second CAR″ comprises an intracellular signaling domain, e.g., a costimulatory signaling domain, not present on the CAR″, and, optionally, does not comprise an ICOS signaling domain

[0780] Other assays, including those that are known in the art can also be used to evaluate the BCMA CAR constructs of the invention.

### Therapeutic Application

[0781] BCMA Associated Diseases and/or Disorders

[0782] In one aspect, the invention provides methods for treating a disease associated with BCMA expression. In one aspect, the invention provides methods for treating a disease wherein part of the tumor is negative for BCMA and part of the tumor is positive for BCMA For example, the CAR of the invention is useful for treating subjects that have undergone treatment for a disease associated with elevated expression of BCMA, wherein the subject that has undergone treatment for elevated levels of BCMA exhibits a disease associated with elevated levels of BCMA. In embodiments, the CAR of the invention is useful for treating subjects that have undergone treatment for a disease associated with expression of BCMA, wherein the subject that has undergone treatment related to expression of BCMA exhibits a disease associated with expression of BCMA.

[0783] In one embodiment, the invention provides methods for treating a disease wherein BCMA is expressed on both normal cells and cancers cells, but is expressed at lower levels on normal cells. In one embodiment, the method further comprises selecting a CAR that binds of the invention with an affinity that allows the BCMA CAR to bind and kill the cancer cells expressing BCMA but less than 30%, 25%, 20%, 15%, 10%, 5% or less of the normal cells expressing BCMA are killed, e.g., as determined by an assay described herein. For example, a killing assay such as flow cytometry based on Cr51 CTL can be used. In one embodiment, the BCMA CAR has an antigen binding domain that has a binding affinity KD of 10⁻⁴ M to 10⁻⁸ M, e.g., 10⁻⁵ M to 10⁻⁷ M, e.g., 10⁻⁶ M or 10⁻⁷ M, for the target antigen. In one embodiment, the BCMA antigen binding domain has a binding affinity that is at least five-fold, 10-fold, 20-fold, 30-fold, 50-fold, 100-fold or 1,000-fold less than a reference antibody, e.g., an antibody described herein.

[0784] In one aspect, the invention pertains to a vector comprising BCMA CAR operably linked to promoter for expression in mammalian immune effector cells, e.g., T cells or NK cells. In one aspect, the invention provides a recombinant immune effector cell, e.g., T cell or NK cell, expressing the BCMA CAR for use in treating BCMA-expressing tumors, wherein the recombinant immune effector cell (e.g., T cell or NK cell) expressing the BCMA CAR is termed a BCMA CAR-expressing cell (e.g., BCMA CART or BCMA CAR-expressing NK cell). In one aspect, the BCMA CAR-expressing cell (e.g., BCMA CART or BCMA CAR-expressing NK cell) of the invention is capable of contacting a tumor cell with at least one BCMA CAR of the invention expressed on its surface such that the BCMA CAR-expressing cell (e.g., BCMA CART or BCMA CAR-expressing NK cell)targets the tumor cell and growth of the tumor is inhibited.

[0785] In one aspect, the invention pertains to a method of inhibiting growth of a BCMA-expressing tumor cell, comprising contacting the tumor cell with a BCMA CAR-expressing cell (e.g., BCMA CART or BCMA CAR-expressing NK cell) of the present invention such that the BCMA CAR-expressing cell (e.g., BCMA CART or BCMA CAR-expressing NK cell) is activated in response to the antigen and targets the cancer cell, wherein the growth of the tumor is inhibited.

[0786] In one aspect, the invention pertains to a method of treating cancer in a subject. The method comprises administering to the subject a BCMA CAR-expressing cell (e.g., BCMA CART or BCMA CAR-expressing NK cell) of the present invention such that the cancer is treated in the subject. An example of a cancer that is treatable by the BCMA CAR-expressing cell (e.g., BCMA CART or BCMA CAR-expressing NK cell) of the invention is a cancer associated with expression of BCMA.

[0787] The invention includes a type of cellular therapy where immune effector cells (e.g., T cells or NK cells) are genetically modified to express a chimeric antigen receptor (CAR) and the BCMA CAR-expressing cell (e.g., BCMA CART or BCMA CAR-expressing NK cell) is infused to a recipient in need thereof. The infused cell is able to kill tumor cells in the recipient. Unlike antibody therapies, CAR-modified cells, e.g., T cells or NK cells, are able to replicate in vivo resulting in long-term persistence that can lead to sustained tumor control. In various aspects, the cells (e.g., T cells or NK cells) administered to the patient, or their progeny, persist in the patient for at least four months, five months, six months, seven months, eight months, nine months, ten months, eleven months, twelve months, thirteen months, fourteen month, fifteen months, sixteen months, seventeen months, eighteen months, nineteen months, twenty months, twenty-one months, twenty-two months, twenty-three months, two years, three years, four years, or five years after administration of the cell (e.g., T cell or NK cell) to the patient.

[0788] The invention also includes a type of cellular therapy where immune effector cells (e.g., T cells or NK cells) are modified, e.g., by in vitro transcribed RNA, to transiently express a chimeric antigen receptor (CAR) and the immune effector cell (e.g., T cell or NK cell) is infused to a recipient in need thereof. The infused cell is able to kill tumor cells in the recipient. Thus, in various aspects, the immune effector cells (e.g., T cells or NK cells) administered to the patient, is present for less than one month, e.g., three weeks, two weeks, one week, after administration of the immune effector cell (e.g., T cell or NK cell) to the patient.

[0789] Without wishing to be bound by any particular theory, the anti-tumor immunity response elicited by the CAR-modified immune effector cells (e.g., T cells or NK cells) may be an active or a passive immune response, or alternatively may be due to a direct vs indirect immune response. In one aspect, the CAR transduced immune effector cells (e.g., T cells or NK cells) exhibit specific proinflammatory cytokine secretion and potent cytolytic activity in response to human cancer cells expressing the BCMA, resist soluble BCMA inhibition, mediate bystander killing and mediate regression of an established human tumor. For example, antigen-less tumor cells within a heterogeneous field of BCMA-expressing tumor may be susceptible to indirect destruction by BCMA-redirected immune effector cells (e.g., T cells or NK cells) that has previously reacted against adjacent antigen-positive cancer cells.

[0790] In one aspect, the fully-human CAR-modified immune effector cells (e.g., T cells or NK cells) of the invention may be a type of vaccine for ex vivo immunization and/or in vivo therapy in a mammal. In one aspect, the mammal is a human.

[0791] With respect to ex vivo immunization, at least one of the following occurs in vitro prior to administering the cell into a mammal: i) expansion of the cells, ii) introducing a nucleic acid encoding a CAR to the cells or iii) cryopreservation of the cells.

[0792] Ex vivo procedures are well known in the art and are discussed more fully below. Briefly, cells are isolated from a mammal (e.g., a human) and genetically modified (i.e., transduced or transfected in vitro) with a vector expressing a CAR disclosed herein. The CAR-modified cell can be administered to a mammalian recipient to provide a therapeutic benefit. The mammalian recipient may be a human and the CAR-modified cell can be autologous with respect to the recipient. Alternatively, the cells can be allogeneic, syngeneic or xenogeneic with respect to the recipient.

[0793] The procedure for ex vivo expansion of hematopoietic stem and progenitor cells is described in U.S. Pat. No. 5,199,942, incorporated herein by reference, can be applied to the cells of the present invention. Other suitable methods are known in the art, therefore the present invention is not limited to any particular method of ex vivo expansion of the cells. Briefly, ex vivo culture and expansion of T cells comprises: (1) collecting CD34+ hematopoietic stem and progenitor cells from a mammal from peripheral blood harvest or bone marrow explants; and (2) expanding such cells ex vivo. In addition to the cellular growth factors described in U.S. Pat. No. 5,199,942, other factors such as flt3-L, IL-1, IL-3 and c-kit ligand, can be used for culturing and expansion of the cells.

[0794] In addition to using a cell-based vaccine in terms of ex vivo immunization, the present invention also provides compositions and methods for in vivo immunization to elicit an immune response directed against an antigen in a patient.

[0795] Generally, the cells activated and expanded as described herein may be utilized in the treatment and prevention of diseases that arise in individuals who are immunocompromised. In particular, the CAR-modified immune effector cells (e.g., T cells or NK cells) of the invention are used in the treatment of diseases, disorders and conditions associated with expression of BCMA. In certain aspects, the cells of the invention are used in the treatment of patients at risk for developing diseases, disorders and conditions associated with expression of BCMA. Thus, the present invention provides methods for the treatment or prevention of diseases, disorders and conditions associated with expression of BCMA comprising administering to a subject in need thereof, a therapeutically effective amount of the CAR-modified immune effector cells (e.g., T cells or NK cells) of the invention.

[0796] In one aspect the CAR-expressing cells (e.g., CART cells or CAR-expressing NK cells) of the inventions may be used to treat a proliferative disease such as a cancer or malignancy or is a precancerous condition such as a myelodysplasia, a myelodysplastic syndrome or a preleukemia. In one aspect, the cancer is a hematolical cancer. Hematological cancer conditions are the types of cancer such as leukemia and malignant lymphoproliferative conditions that affect blood, bone marrow and the lymphatic system. In one aspect, the hematological cancer is a leukemia or a hematological. An example of a disease or disorder associated with BCMA is multiple myeloma (also known as MM) (See Claudio et al., Blood. 2002, 100(6):2175-86; and Novak et al., Blood. 2004, 103(2):689-94). Multiple myeloma, also known as plasma cell myeloma or Kahler's disease, is a cancer characterized by an accumulation of abnormal or malignant plasma B-cells in the bone marrow. Frequently, the cancer cells invade adjacent bone, destroying skeletal structures and resulting in bone pain and fractures. Most cases of myeloma also features the production of a paraprotein (also known as M proteins or myeloma proteins), which is an abnormal immunoglobulin produced in excess by the clonal proliferation of the malignant plasma cells. Blood serum paraprotein levels of more than 30 g/L is diagnostic of multiple myeloma, according to the diagnostic criteria of the International Myeloma Working Group (IMWG) (See Kyle et al. (2009), Leukemia. 23:3-9). Other symptoms or signs of multiple myeloma include reduced kidney function or renal failure, bone lesions, anemia, hypercalcemia, and neurological symptoms.

[0797] Criteria for distinguishing multiple myeloma from other plasma cell proliferative disorders have been established by the International Myeloma Working Group (See Kyle et al. (2009), Leukemia. 23:3-9). All three of the following criteria must be met:
[0798] Clonal bone marrow plasma cells ≥10%
[0799] Present of serum and/or urinary monoclonal protein (except in patients with true non-secretory multiple myeloma)
[0800] Evidence of end-organ damage attributable to the underlying plasma cell proliferative disorder, specifically:
   [0801] Hypercalcemia: serum calcium ≥11.5 mg/100 ml
   [0802] Renal insufficienty: serum creatinine >1.73 mmol/1
   [0803] Anemia: normochromic, normocytic with a hemoglobin value of >2 g/100 ml below the lower limit of normal, or a hemoglobin value <10 g/100 ml
   [0804] Bone lesions: lytic lesions, severe osteopenia, or pathologic fractures.

[0805] Other plasma cell proliferative disorders that can be treated by the compositions and methods described herein include, but are not limited to, asymptomatic myeloma (smoldering multiple myeloma or indolent myeloma), monoclonal gammapathy of undetermined significance (MGUS), Waldenstrom's macroglobulinemia, plasmacytomas (e.g., plasma cell dyscrasia, solitary myeloma, solitary plasmacytoma, extramedullary plasmacytoma, and multiple plasmacytoma), systemic amyloid light chain amyloidosis, and POEMS syndrome (also known as Crow-Fukase syndrome, Takatsuki disease, and PEP syndrome).

[0806] Two staging systems are used in the staging of multiple myeloma: the International Staging System (ISS) (See Greipp et al. (2005), J. Clin. Oncol. 23 (15):3412-3420, herein incorporated by reference in its entirety) and the Durie-Salmon Staging system (DSS) (See Durie et al. (1975), Cancer 36 (3): 842-854, herein incorporated by reference in its entirety). The two staging systems are summarized in the table below:

TABLE 6
Staging systems for the staging of multiple myeloma

| | International Staging System | | Durie-Salmon Staging System | |
|---|---|---|---|---|
| | | Median | | Median |
| Stage | Criteria | survival | Criteria | survival* |
| I | β₂M <3.5 mg/l and | 62 months | All of the following: | IA: 62 months |
| | serum albumin ≥3.5 g/dL | | Hemoglobin level >10 g/dL | |
| | | | Serum calcium, normal or <12 mg/dL | IB: 22 months |
| | | | Bone x-ray, normal or 1 | |
| | | | plasmacytoma only | |
| | | | Low monoclonal protein | |
| | | | production (IgG <5 g/dL, | |
| | | | IgA <3 g/dL, Bence Jones protein <4 | |
| | | | g/dL per 24 hours | |
| II | Neither stage I or stage III | 44 months | Neither stage I or stage III | IIA: 58 months |
| | | | | IIB: 354 months |
| III | β₂M ≥5.5 mg/l | 29 months | One or more of the following: | IIIA: 45 months |
| | | | Hemogloblin level <8.5 g/dL | IIIB: 24 months |
| | | | Serum calcium, normal or >12 mg/dL | |
| | | | Advanced osteolytic lesions | |
| | | | High monoclonal protein | |
| | | | production (IgG >7 g/dL, | |
| | | | IgA >5 g/dL, Bence Jones protein >12 | |
| | | | g/dL per 24 hours | |

*The Durie-Salmon Staging system also includes a subclassification that designates the status of renal function. The designation of “A” or “B” is added after the stage number, wherein “A” indicates relatively normal renal function (serum creatinine value <2.0 mg/dL), and B indicates abnormal renal function (serum creatinine value >2.0 mg/dL).

[0807] A third staging system for multiple myeloma is referred to as Revised International Staging System (R-ISS) (see Palumbo A, Avet-Loiseau H, Oliva S, et al. Journal of clinical oncology: official journal of the American Society of Clinical Oncology 2015; 33:2863-9, herein incorporated by reference in its entirety). R-ISS stage I includes ISS stage I (serum β2-microglobulin level <3.5 mg/L and serum albumin level ≥3.5 g/dL), no high-risk CA [del(17p) and/or t(4; 14) and/or t(14; 16)], and normal LDH level (less than the upper limit of normal range). R-ISS stage III includes ISS stage III (serum J32-microglobulin level ≥5.5 mg/L) and high-risk CA or high LDH level. R-ISS stage II includes all the other possible combinations.

[0808] The response of patients can be determined based on IMWG 2016 criteria, as disclosed in Kumar S, Paiva B, Anderson K C, et al. International Myeloma Working Group consensus criteria for response and minimal residual disease assessment in multiple myeloma. The Lancet Oncology; 17(8):e328-e346 (2016), herein incorporated by reference in its entirety. Table 7 provides IMWG 2016 criteria for response assessment.

TABLE 7
IMWG criteria for response assessment including criteria for minimal residual disease (MRD)

Response criteria*

IMWG MRD criteria (requires a complete response as defined below)

| | |
|---|---|
| Sustained MRD-negative | MRD negativity in the marrow (NGF or NGS, or both) and by imaging |
| | as defined below, confirmed minimum of 1 year apart. Subsequent |
| | evaluations can be used to further specify the duration of negativity (e.g., |
| | MRD-negative at 5 years)† |
| Flow MRD-negative | Absence of phenotypically aberrant clonal plasma cells by NGF‡ on bone |
| | marrow aspirates using the EuroFlow standard operation procedure for |
| | MRD detection in multiple myeloma (or validated equivalent method) |
| | with a minimum sensitivity of 1 in 10⁵ nucleated cells or higher |
| Sequencing MRD- | Absence of clonal plasma cells by NGS on bone marrow aspirate in |
| negative | which presence of a clone is defined as less than two identical sequencing |
| | reads obtained after DNA sequencing of bone marrow aspirates using the |
| | LymphoSIGHT platform (or validated equivalent method) with a |
| | minimum sensitivity of 1 in 10⁵ nucleated cells§ or higher |
| Imaging plus MRD- | MRD negativity as defined by NGF or NGS plus disappearance of every |
| negative | area of increased tracer uptake found at baseline or a preceding PET/CT |
| | or decrease to less mediastinal blood pool SUV or decrease to less than |
| | that of surrounding normal tissue¶ |

Standard IMWG response criteria||

| | |
|---|---|
| Stringent complete | Complete response as defined below plus normal FLC ratio** and |
| response | absence of clonal cells in bone marrow biopsy by immunohistochemistry |
| | (κ/λ ratio ≤4:1 or ≥1:2 for |
| | κ and λ patients, respectively, after counting ≥100 plasma cells)†† |
| Complete response | Negative immunofixation on the serum and urine and disappearance of |
| | any soft tissue plasmacytomas and ≤5% plasma cells in bone marrow |
| | aspirates |
| Very good partial | Serum and urine M-protein detectable by immunofixation but not on |
| response | electrophoresis or ≥90% reduction in serum M-protein plus urine M- |
| | protein level ≤100 mg per 24 h |
| Partial response | ≥50% reduction of serum M-protein plus reduction in 24 h urinary M- |
| | protein by ≥90% or to ≤200 mg per 24 h; |
| | If the serum and urine M-protein are unmeasurable, a ≥50% decrease in |
| | the difference between involved and uninvolved FLC levels is required in |
| | place of the M-protein criteria; |
| | If serum and urine M-protein are unmeasurable, and serum-free light |
| | assay is also unmeasurable, ≥50% reduction in plasma cells is required in |
| | place of M-protein, provided baseline bone marrow plasma-cell |
| | percentage was ≥30%. In addition to these criteria, if present at baseline, |
| | a ≥50% reduction in the size (SPD)§§ of soft tissue plasmacytomas is |
| | also required |
| Minimal response | ≥25% but ≤49% reduction of serum M-protein and reduction in 24-h |
| | urine M-protein by 50-89%. In addition to the above listed criteria, if |
| | present at baseline, a ≥50% reduction in the size (SPD)§§ of soft tissue |
| | plasmacytomas is also required |
| Stable disease | Not recommended for use as an indicator of response; stability of disease |
| | is best described by providing the time-to-progression estimates. Not |
| | meeting criteria for complete response, very good partial response, partial |
| | response, minimal response, or progressive disease |
| Progressive disease ¶¶, \|\|\|\| | Any one or more of the following criteria: |
| | Increase of 25% from lowest confirmed response value in one or more of |
| | the following criteria: |
| | Serum M-protein (absolute increase must be ≥0.5 g/dL); |
| | Serum M-protein increase ≥1 g/dL, if the lowest M component was ≥5 |
| | g/dL; |
| | Urine M-protein (absolute increase must be ≥200 mg/24 h); |
| | In patients without measurable serum and urine M-protein levels, the |
| | difference between involved and uninvolved FLC levels (absolute |
| | increase must be ≥10 mg/dL); |
| | In patients without measurable serum and urine M-protein levels and |
| | without measurable involved FLC levels, bone marrow plasma-cell |
| | percentage irrespective of baseline status (absolute increase must |
| | be ≥10%); |
| | Appearance of a new lesion(s), ≥50% increase from nadir in SPD§§ |
| | of ≥1 lesion, or ≥50% increase in the longest diameter of a previous |
| | lesion ≥1 cm in short axis; |
| | ≥50% increase in circulating plasma cells (minimum of 200 cells per μL) |
| | if this is the only measure of disease |
| Clinical relapse | Clinical relapse requires one or more of the following criteria: |
| | Direct indicators of increasing disease and/or end organ dysfunction |
| | (CRAB features) related to the underlying clonal plasma-cell |
| | proliferative disorder. It is not used in calculation of time to progression |
| | or progression-free survival but is listed as something that can be |
| | reported optionally or for use in clinical practice; |
| | Development of new soft tissue plasmacytomas or bone lesions |
| | (osteoporotic fractures do not constitute progression); |
| | Definite increase in the size of existing plasmacytomas or bone lesions. A |
| | definite increase is defined as a 50% (and ≥1 cm) increase as measured |
| | serially by the SPD§§ of the measurable lesion; |
| | Hypercalcaemia (≥11 mg/dL); |
| | Decrease in haemoglobin of ≥2 g/dL not related to therapy or other non- |
| | myeloma-related conditions; |
| | Rise in serum creatinine by 2 mg/dL or more from the start of the therapy |
| | and attributable to myeloma; |
| | Hyperviscosity related to serum paraprotein |
| Relapse from complete | Any one or more of the following criteria: |
| response (to be used only | Reappearance of serum or urine M-protein by immunofixation or |
| if the end point is | electrophoresis; |
| disease-free survival) | Development of ≥5% plasma cells in the bone marrow; |
| | Appearance of any other sign of progression (i.e., new plasmacytoma, |
| | lytic bone lesion, or hypercalcaemia see above) |
| Relapse from MRD | Any one or more of the following criteria: |
| negative (to be used only | Loss of MRD negative state (evidence of clonal plasma cells on NGF or |
| if the end point is | NGS, or positive imaging study for recurrence of myeloma); |
| disease-free survival) | Reappearance of serum or urine M-protein by immunofixation or |
| | electrophoresis; |
| | Development of ≥5% clonal plasma cells in the bone marrow; |
| | Appearance of any other sign of progression (i.e., new plasmacytoma, |
| | lytic bone lesion, or hypercalcaemia) |

For MRD assessment, the first bone marrow aspirate should be sent to MRD (not for morphology) and this sample should be taken in one draw with a volume of minimally 2 mL (to obtain sufficient cells), but maximally 4-5 mL to avoid haemodilution. IMWG = International Myeloma Working Group. MRD = minimal residual disease. NGF = next-generation flow. NGS = next-generation sequencing. FLC = free light chain. M-protein = myeloma protein. SPD = sum of the products of the maximal perpendicular diameters of measured lesions. CRAB features = calcium elevation, renal failure, anaemia, lytic bone lesions. FCM = flow cytometry. SUVₘₐₓ = maximum standardised uptake value. MFC = multiparameter flow cytometry. ¹^{⁸}F-FDG PET = ¹^{⁸}F-fluorodeoxyglucose PET. ASCT = autologous stem cell transplantation.
*All response categories require two consecutive assessments made any time before starting any new therapy; for MRD there is no need for two consecutive assessments, but information on MRD after each treatment stage is recommended (eg, after induction, high-dose therapy/ASCT, consolidation, maintenance). MRD tests should be initiated only at the time of suspected complete response.
All categories of response and MRD require no known evidence of progressive or new bone lesions if radiographic studies were performed. However, radiographic studies are not required to satisfy these response requirements except for the requirement of FDG PET if imaging MRD- negative status is reported,†Sustained MRD negativity when reported should also annotate the method used (eg, sustained flow MRD-negative, sustained sequencing MRD-negative).† Bone marrow MFC should follow NGF guidelines (Paiva B, Gutierrez NC, Rosinol L, et al, Blood 2012; 119: 687-91). The reference NGF method is an eight-colour two-tube approach, which has been extensively validated. The two-tube approach improves reliability, consistency, and sensitivity because of the acquisition of a greater number of cells. The eight-colour technology is widely available globally and the NGF method has already been adopted in many flow laboratories worldwide. The complete eight-colour method is most efficient using a lyophilised mixture of antibodies which reduces errors, time, and costs. 5 million cells should be assessed. The FCM method employed should have a sensitivity of detection of at least 1 in 10⁵ plasma cells. §DNA sequencing assay on bone marrow aspirate should use a validated assay such as LymphoSIGHT (Sequenta).
¶Criteria used by Zamagni and colleagues (Zamagni E, Nanni C, Mancuso K, et al. Clin Cancer Res 2015; 21: 4384-90), and expert panel (IMPetUs; Italian Myeloma criteria for PET Use) (Usmani SZ, Mitchell A, Waheed S, et al. Blood 2013; 121: 1819-23; Nanni C, Zamagni E, Versari A, et al. Eur J Nucl Med Mol Imaging 2015; 43: 414-21.). Baseline positive lesions were identified by presence of focal areas of increased uptake within bones, with or without any underlying lesion identified by CT and present on at least two consecutive slices. Alternatively, an SUVₘₐₓ = 2.5 within osteolytic CT areas >1 cm in size, or SUVₘₐₓ = 1.5 within osteolytic CT areas ≤1 cm in size were considered positive. Imaging should be performed once MRD negativity is determined by MFC or NGS.
|||Derived from international uniform response criteria for multiple myeloma (Durie BG, Harousseau JL, Miguel JS, et al, Leukemia 2006; 20: 1467-73). Minor response definition and clarifications derived from Rajkumar and colleagues (Rajkumar SV, Harousseau JL, Durie B, et al, Blood 2011; 117: 4691-95). When the only method to measure disease is by serum FLC levels: complete response can be defined as a normal FLC ratio of 0.26 to 1.65 in addition to the complete response criteria listed previously. Very good partial response in such patients requires a ≥90% decrease in the difference between involved and uninvolved FLC levels. All response categories require two consecutive assessments made at any time before the institution of any new therapy; all categories also require no known evidence of progressive or new bone lesions or extramedullary plasmacytomas if radiographic studies were performed. Radiographic studies are not required to satisfy these response requirements. Bone marrow assessments do not need to be confirmed. Each category, except for stable disease, will be considered unconfirmed until the confirmatory test is performed. The date of the initial test is considered as the date of response for evaluation of time dependent outcomes such as duration of response.
**All recommendations regarding clinical uses relating to serum FLC levels or FLC ratio are based on results obtained with the validated Freelite test (Binding Site, Birmingham, UK).
††Presence/absence of clonal cells on immunohistochemistry is based upon the κ/λ/L ratio. An abnormal κ/λ ratio by immunohistochemistry requires a minimum of 100 plasma cells for analysis. An abnormal ratio reflecting presence of an abnormal clone is κ/λ of >4:1 or <1:2. ‡‡Special attention should be given to the emergence of a different monoclonal protein following treatment, especially in the setting of patients having achieved a conventional complete response, often related to oligoclonal reconstitution of the immune system. These bands typically disappear over time and in some studies have been associated with a better outcome. Also, appearance of monoclonal IgG κ in patients receiving monoclonal antibodies should be differentiated from the therapeutic antibody.
§§Plasmacytoma measurements should be taken from the CT portion of the PET/CT, or MRI scans, or dedicated CT scans where applicable. For patients with only skin involvement, skin lesions should be measured with a ruler. Measurement of tumour size will be determined by the SPD.
¶¶Positive immunofixation alone in a patient previously classified as achieving a complete response will not be considered progression. For purposes of calculating time to progression and progression-free survival, patients who have achieved a complete response and are MRD-negative should be evaluated using criteria listed for progressive disease. Criteria for relapse from a complete response or relapse from MRD should be used only when calculating disease-free survival.
||||In the case where a value is felt to be a spurious result per physician discretion (eg, a possible laboratory error), that value will not be considered when determining the lowest value.

[0809] Standard treatment for multiple myeloma and associated diseases includes chemotherapy, stem cell transplant (autologous or allogeneic), radiation therapy, and other drug therapies. Frequently used anti-myeloma drugs include alkylating agents (e.g., bendamustine, cyclophosphamide and melphalan), proteasome inhibitors (e.g., bortezomib), corticosteroids (e.g., dexamethasone and prednisone), and immunomodulators (e.g., thalidomide and lenalidomide or Revlimid®), or any combination thereof. Biphosphonate drugs are also frequently administered in combination with the standard anti-MM treamtents to prevent bone loss. Patients older than 65-70 years of age are unlikely candidates for stem cell transplant. In some cases, double-autologous stem cell transplants are options for patients less than 60 years of age with suboptimal response to the first transplant. The compositions and methods of the present invention may be administered in combination with any of the currently prescribed treatments for multiple myeloma.

[0810] The first phase of treatment for multiple myeloma is induction therapy. The goal of induction therapy is to reduce the number of plasma cells in the bone marrow and the molecules (e.g., proteins) produced by the plasma cells. Induction therapy usually comprises a combination of 2 or 3 of the following types of drugs: targeted therapy, chemotherapy, or corticosteroids.

Induction Therapy for Patients Who can have a Stem Cell Transplant

[0811] Patients for a stem cell transplant are usually 70 years of age or younger and in generally good health. Patients can have induction therapy followed by high-dose chemotherapy and a stem cell transplant. Induction therapy is usually given for several cycles and may include one or more of the following drugs: CyBorD regimen-cyclophosphamide (Cytoxan, Procytox), bortezomib (Velcade) and dexamethasone (Decadron, Dexasone); VRD regimen-bortezomib, lenalidomide (Revlimid) and dexamethasone; thalidomide (Thalomid) and dexamethasone; lenalidomide and low-dose dexamethasone; bortezomib and dexamethasone; VTD regimen-bortezomib, thalidomide and dexamethasone; bortezomib, cyclophosphamide and prednisone; bortezomib, doxorubicin (Adriamycin) and dexamethasone; dexamethasone; or liposomal doxorubicin (Caelyx, Doxil), vincristine (Oncovin) and dexamethasone

Induction Therapy for Patients Who Cannot have a Stem Cell Transplant

[0812] Patients who cannot have a stem cell transplant may have induction therapy using one or more of the following drugs: CyBorD regimen-cyclophosphamide, bortezomib and dexamethasone; lenalidomide (Revlimid) and low-dose dexamethasone; MPT regimen-melphalan, prednisone and thalidomide; VMP regimen-bortezomib, melphalan and prednisone; MPL regimen-melphalan, prednisone and lenalidomide; melphalan and prednisone; bortezomib and dexamethasone; dexamethasone; liposomal doxorubicin, vincristine and dexamethasone; thalidomide and dexamethasone; VAD regimen-vincristine, doxorubicin and dexamethasone; or VRD regimen-bortezomib, lenalidomide and dexamethasone.

[0813] Another example of a disease or disorder associated with BCMA is Hodgkin's lymphoma and non-Hodgkin's lymphoma (See Chiu et al., Blood. 2007, 109(2):729-39; He et al., J Immunol. 2004, 172(5):3268-79).

[0814] Hodgkin's lymphoma (HL), also known as Hodgkin's disease, is a cancer of the lymphatic system that originates from white blood cells, or lymphocytes. The abnormal cells that comprise the lymphoma are called Reed-Sternberg cells. In Hodgkin's lymphoma, the cancer spreads from one lymph node group to another. Hodgkin's lymphoma can be subclassified into four pathologic subtypes based upon Reed-Sternberg cell morphology and the cell composition around the Reed-Sternberg cells (as determined through lymph node biopsy): nodular sclerosing HL, mixed-cellularity subtype, lymphocyte-rich or lymphocytic predominance, lymphocyte depleted. Some Hodgkin's lymphoma can also be nodular lymphocyte predominant Hodgkin's lymphoma, or can be unspecified. Symptoms and signs of Hodgkin's lymphoma include painless swelling in the lymph nodes in the neck, armpits, or groin, fever, night sweats, weight loss, fatigue, itching, or abdominal pain.

[0815] Non-Hodgkin's lymphoma (NHL) comprises a diverse group of blood cancers that include any kind of lymphoma other than Hodgkin's lymphoma. Subtypes of non-Hodgkin's lymphoma are classified primarily by cell morphology, chromosomal aberrations, and surface markers. NHL subtypes (or NHL-associated cancers) include B cell lymphomas such as, but not limited to, Burkitt's lymphoma, B-cell chronic lymphocytic leukemia (B-CLL), B-cell prolymphocytic leukemia (B-PLL), chronic lymphocytic leukemia (CLL), diffuse large B-cell lymphoma (DLBCL) (e.g., intravascular large B-cell lymphoma and primary mediastinal B-cell lymphoma), follicular lymphoma (e.g., follicle center lymphoma, follicular small cleaved cell), hair cell leukemia, high grade B-cell lymphoma (Burkitt's like), lymphoplasmacytic lymphoma (Waldenstrom's macroglublinemia), mantle cell lymphoma, marginal zone B-cell lymphomas (e.g., extranodal marginal zone B-cell lymphoma or mucosa-associated lymphoid tissue (MALT) lymphoma, nodal marginal zone B-cell lymphoma, and splenic marginal zone B-cell lymphoma), plasmacytoma/myeloma, precursor B-lymphoblastic leukemia/lymphoma (PB-LBL/L), primary central nervous system (CNS) lymphoma, primary intraocular lymphoma, small lymphocytic lymphoma (SLL); and T cell lymphomas, such as, but not limited to, anaplastic large cell lymphoma (ALCL), adult T-cell lymphoma/leukemia (e.g., smoldering, chronic, acute and lymphomatous), angiocentric lymphoma, angioimmunoblastic T-cell lymphoma, cutaneous T-cell lymphomas (e.g., mycosis fungoides, Sezary syndrome, etc.), extranodal natural killer/T-cell lymphoma (nasal-type), enteropathy type intestinal T-cell lymphoma, large granular lymphocyte leukemia, precursor T-lymphoblastic lymphoma/leukemia (T-LBL/L), T-cell chronic lymphocytic leukemia/prolymphocytic leukemia (T-CLL/PLL), and unspecified peripheral T-cell lymphoma. Symptoms and signs of Hodgkin's lymphoma include painless swelling in the lymph nodes in the neck, armpits, or groin, fever, night sweats, weight loss, fatigue, itching, abdominal pain, coughing, or chest pain.

[0816] The staging is the same for both Hodgkin's and non-Hodgkin's lymphoma, and refers to the extent of spread of the cancer cells within the body. In stage I, the lymphoma cells are in one lymph node group. In stage II, lymphoma cells are present in at least two lymph node groups, but both groups are on the same side of the diaphragm, or in one part of a tissue or organ and the lymph nodes near that organ on the same side of the diaphragm. In stage III, lymphoma cells are in lymph nodes on both sides of the diaphragm, or in one part of a tissue or organ near these lymph node groups or in the spleen. In stage IV, lymphoma cells are found in several parts of at least one organ or tissue, or lymphoma cells are in an organ and in lymph nodes on the other side of the diaphragm. In addition to the Roman numeral staging designation, the stages of can also be described by letters A, B, E, and S, wherein A refers to patients without symptoms, B refers to patients with symptoms, E refers to patients in which lymphoma is found in tissues outside the lymph system, and S refers to patients in which lymphoma is found in the spleen.

[0817] Hodgkin's lymphoma is commonly treated with radiation therapy, chemotherapy, or hematopoietic stem cell transplantation. The most common therapy for non-Hodgkin's lymphoma is R-CHOP, which consists of four different chemotherapies (cyclophosphamide, doxorubicin, vincristine, and prenisolone) and rituximab (Rituxan®). Other therapies commonly used to treat NHL include other chemotherapeutic agents, radiation therapy, stem cell transplantation (autologous or allogeneic bone marrow transplantation), or biological therapy, such as immunotherapy. Other examples of biological therapeutic agents include, but are not limited to, rituximab (Rituxan®), tositumomab (Bexxar®), epratuzumab (LymphoCide®), and alemtuzumab (MabCampath®). The compositions and methods of the present invention may be administered in combination with any of the currently prescribed treatments for Hodgkin's lymphoma or non-Hodgkin's lymphoma.

[0818] BCMA expression has also been associated Waldenstrom's macroglobulinemia (WM), also known as lymphoplasmacytic lymphoma (LPL). (See Elsawa et al., Blood. 2006, 107(7):2882-8). Waldenstrom's macroglobulinemia was previously considered to be related to multiple myeloma, but has more recently been classified as a subtype of non-Hodgkin's lymphoma. WM is characterized by uncontrolled B-cell lymphocyte proliferation, resulting in anemia and production of excess amounts of paraprotein, or immunoglobulin M (IgM), which thickens the blood and results in hyperviscosity syndrome. Other symptoms or signs of WM include fever, night sweats, fatigue, anemia, weight loss, lymphadenopathy or splenomegaly, blurred vision, dizziness, nose bleeds, bleeding gums, unusual bruises, renal impairment or failure, amyloidosis, or peripheral neuropathy.

[0819] Standard treatment for WM consists of chemotherapy, specifically with rituximab (Rituxan®). Other chemotherapeutic drugs can be used in combination, such as chlorambucil (Leukeran®), cyclophosphamide (Neosar®), fludarabine (Fludara®), cladribine (Leustatin®), vincristine, and/or thalidomide. Corticosteriods, such as prednisone, can also be administered in combination with the chemotherapy. Plasmapheresis, or plasma exchange, is commonly used throughout treatment of the patient to alleviate some symptoms by removing the paraprotein from the blood. In some cases, stem cell transplantation is an option for some patients.

[0820] Another example of a disease or disorder associated with BCMA is brain cancer. Specifically, expression of BCMA has been associated with astrocytoma or glioblastoma (See Deshayes et al, Oncogene. 2004, 23(17):3005-12, Pelekanou et al., PLoS One. 2013, 8(12):e83250). Astrocytomas are tumors that arise from astrocytes, which are a type of glial cell in the brain. Glioblastoma (also known as glioblastoma multiforme or GBM) is the most malignant form of astrocytoma, and is considered the most advanced stage of brain cancer (stage IV). There are two variants of glioblastoma: giant cell glioblastoma and gliosarcoma. Other astrocytomas include juvenile pilocytic astrocytoma (JPA), fibrillary astrocytoma, pleomorphic xantroastrocytoma (PXA), desembryoplastic neuroepithelial tumor (DNET), and anaplastic astrocytoma (AA).

[0821] Symptoms or signs associated with glioblastoma or astrocytoma include increased pressure in the brain, headaches, seizures, memory loss, changes in behavior, loss in movement or sensation on one side of the body, language dysfunction, cognitive impairments, visual impairment, nausea, vomiting, and weakness in the arms or legs.

[0822] Surgical removal of the tumor (or resection) is the standard treatment for removal of as much of the glioma as possible without damaging or with minimal damage to the normal, surrounding brain. Radiation therapy and/or chemotherapy are often used after surgery to suppress and slow recurrent disease from any remaining cancer cells or satellite lesions. Radiation therapy includes whole brain radiotherapy (conventional external beam radiation), targeted three-dimensional conformal radiotherapy, and targeted radionuclides. Chemotherapeutic agents commonly used to treat glioblastoma include temozolomide, gefitinib or erlotinib, and cisplatin. Angiogenesis inhibitors, such as Bevacizumab (Avastin®), are also commonly used in combination with chemotherapy and/or radiotherapy.

[0823] Supportive treatment is also frequently used to relieve neurological symptoms and improve neurologic function, and is administered in combination any of the cancer therapies described herein. The primary supportive agents include anticonvulsants and corticosteroids. Thus, the compositions and methods of the present invention may be used in combination with any of the standard or supportive treatments to treat a glioblastoma or astrocytoma.

[0824] Non-cancer related diseases and disorders associated with BCMA expression can also be treated by the compositions and methods disclosed herein. Examples of non-cancer related diseases and disorders associated with BCMA expression include, but are not limited to: viral infections; e.g., HIV, fungal invections, e.g., C. neoformans; irritable bowel disease; ulcerative colitis, and disorders related to mucosal immunity.

[0825] The CAR-modified immune effector cells (e.g., T cells or NK cells) of the present invention may be administered either alone, or as a pharmaceutical composition in combination with diluents and/or with other components such as IL-2 or other cytokines or cell populations.

[0826] The present invention provides for compositions and methods for treating cancer. In one aspect, the cancer is a hematologic cancer including but is not limited to hematolical cancer is a leukemia or a lymphoma. In one aspect, the CAR-expressing cells (e.g., CART cells or CAR-expressing NK cells)of the invention may be used to treat cancers and malignancies such as, but not limited to, e.g., acute leukemias including but not limited to, e.g., B-cell acute lymphoid leukemia (“BALL”), T-cell acute lymphoid leukemia (“TALL”), acute lymphoid leukemia (ALL); one or more chronic leukemias including but not limited to, e.g., chronic myelogenous leukemia (CML), chronic lymphocytic leukemia (CLL); additional hematologic cancers or hematologic conditions including, but not limited to, e.g., B cell prolymphocytic leukemia, blastic plasmacytoid dendritic cell neoplasm, Burkitt's lymphoma, diffuse large B cell lymphoma, Follicular lymphoma, Hairy cell leukemia, small cell- or a large cell-follicular lymphoma, malignant lymphoproliferative conditions, MALT lymphoma, mantle cell lymphoma, Marginal zone lymphoma, multiple myeloma, myelodysplasia and myelodysplastic syndrome, non-Hodgkin's lymphoma, plasmablastic lymphoma, plasmacytoid dendritic cell neoplasm, Waldenstrom macroglobulinemia, and “preleukemia” which are a diverse collection of hematological conditions united by ineffective production (or dysplasia) of myeloid blood cells, and the like. Further a disease associated with BCMA expression includes, but not limited to, e.g., atypical and/or non-classical cancers, malignancies, precancerous conditions or proliferative diseases expressing BCMA.

[0827] In embodiments, a composition described herein can be used to treat a disease including but not limited to a plasma cell proliferative disorder, e.g., asymptomatic myeloma (smoldering multiple myeloma or indolent myeloma), monoclonal gammapathy of undetermined significance (MGUS), Waldenstrom's macroglobulinemia, plasmacytomas (e.g., plasma cell dyscrasia, solitary myeloma, solitary plasmacytoma, extramedullary plasmacytoma, and multiple plasmacytoma), systemic amyloid light chain amyloidosis, and POEMS syndrome (also known as Crow-Fukase syndrome, Takatsuki disease, and PEP syndrome).

[0828] In embodiments, a composition described herein can be used to treat a disease including but not limited to a cancer, e.g., a cancer described herein, e.g., a prostate cancer (e.g., castrate-resistant or therapy-resistant prostate cancer, or metastatic prostate cancer), pancreatic cancer, or lung cancer.

[0829] The present invention also provides methods for inhibiting the proliferation or reducing a BCMA-expressing cell population, the methods comprising contacting a population of cells comprising a BMCA-expressing cell with an anti-BCMA CAR-expressing cell (e.g., BCMA CART cell or BCMA CAR-expressing NK cell)of the invention that binds to the BCMA-expressing cell. In a specific aspect, the present invention provides methods for inhibiting the proliferation or reducing the population of cancer cells expressing BCMA, the methods comprising contacting the BCMA-expressing cancer cell population with an anti-BCMA CAR-expressing cell (e.g., BCMA CART cell or BCMA CAR-expressing NK cell)of the invention that binds to the BCMA-expressing cell. In one aspect, the present invention provides methods for inhibiting the proliferation or reducing the population of cancer cells expressing BCMA, the methods comprising contacting the BMCA-expressing cancer cell population with an anti-BCMA CAR-expressing cell (e.g., BCMA CART cell or BCMA CAR-expressing NK cell)of the invention that binds to the BCMA-expressing cell. In certain aspects, the anti-BCMA CAR-expressing cell (e.g., BCMA CART cell or BCMA CAR-expressing NK cell)of the invention reduces the quantity, number, amount or percentage of cells and/or cancer cells by at least 25%, at least 30%, at least 40%, at least 50%, at least 65%, at least 75%, at least 85%, at least 95%, or at least 99% in a subject with or animal model for myeloid leukemia or another cancer associated with BCMA-expressing cells relative to a negative control. In one aspect, the subject is a human.

[0830] The present invention also provides methods for preventing, treating and/or managing a disease associated with BCMA-expressing cells (e.g., a hematologic cancer or atypical cancer expessing BCMA), the methods comprising administering to a subject in need an anti-BCMA CAR-expressing cell (e.g., BCMA CART cell or BCMA CAR-expressing NK cell)of the invention that binds to the BCMA-expressing cell. In one aspect, the subject is a human. Non-limiting examples of disorders associated with BCMA-expressing cells include viral or fungal infections, and disorders related to mucosal immunity.

[0831] The present invention also provides methods for preventing, treating and/or managing a disease associated with BCMA-expressing cells, the methods comprising administering to a subject in need an anti-BCMA CAR-expressing cell (e.g., BCMA CART cell or BCMA CAR-expressing NK cell)of the invention that binds to the BCMA-expressing cell. In one aspect, the subject is a human.

[0832] The present invention provides methods for preventing relapse of cancer associated with BCMA-expressing cells, the methods comprising administering to a subject in need thereof an anti-BCMA CAR-expressing cell (e.g., BCMA CART cell or BCMA CAR-expressing NK cell)of the invention that binds to the BCMA-expressing cell. In one aspect, the methods comprise administering to the subject in need thereof an effective amount of an anti-BCMA CAR-expressing cell (e.g., BCMA CART cell or BCMA CAR-expressing NK cell)described herein that binds to the BCMA-expressing cell in combination with an effective amount of another therapy.

### Methods Using Biomarkers for Evaluating CAR-Effectiveness, Subject Suitability, or Sample Suitability

[0833] In another aspect, the invention features a method of evaluating or monitoring the effectiveness of a CAR-expressing cell therapy (e.g., a BCMA CAR therapy), in a subject (e.g., a subject having a cancer, e.g., a hematological cancer), or the suitability of a sample (e.g., an apheresis sample) for a CAR therapy (e.g., a BCMA CAR therapy). The method includes acquiring a value of effectiveness to the CAR therapy, subject suitability, or sample suitability, wherein said value is indicative of the effectiveness or suitability of the CAR-expressing cell therapy.

[0834] In some embodiments of any of the methods disclosed herein, the CAR-expressing cell therapy comprises a plurality (e.g., a population) of CAR-expressing immune effector cells, e.g., a plurality (e.g., a population) of T cells or NK cells, or a combination thereof. In one embodiment, the CAR-expressing cell therapy is a BCMACAR therapy.

[0835] In some embodiments of any of the methods disclosed herein, the subject is evaluated prior to receiving, during, or after receiving, the CAR-expressing cell therapy.

[0836] In some embodiments of any of the methods disclosed herein, a responder (e.g., a complete responder) has, or is identified as having, a greater level or activity of one, two, or more (all) of GZMK, PPF1BP2, or naïve T cells as compared to a non-responder.

[0837] In some embodiments of any of the methods disclosed herein, a non-responder has, or is identified as having, a greater level or activity of one, two, three, four, five, six, seven, or more (e.g., all) of IL22, IL-2RA, IL-21, IRF8, IL8, CCL17, CCL22, effector T cells, or regulatory T cells, as compared to a responder.

[0838] In an embodiment, a relapser is a patient having, or who is identified as having, an increased level of expression of one or more of (e.g., 2, 3, 4, or all of) the following genes, compared to non relapsers: MIR199A1, MIR1203, uc021ovp, ITM2C, and HLA-DQB1 and/or a decreased levels of expression of one or more of (e.g., 2, 3, 4, 5, 6, 7, 8, 9, 10, 11, or all of) the following genes, compared to non relapsers: PPIAL4D, TTTY10, TXLNG2P, MIR4650-1, KDMSD, USP9Y, PRKY, RPS4Y2, RPS4Y1, NCRNA00185, SULT1E1, and EIF1AY.

[0839] In some embodiments of any of the methods disclosed herein, a non-responder has, or is identified as having, a greater percentage of an immune cell exhaustion marker, e.g., one, two or more immune checkpoint inhibitors (e.g., PD-1, PD-L1, TIM-3 and/or LAG-3). In one embodiment, a non-responder has, or is identified as having, a greater percentage of PD-1, PD-L1, or LAG-3 expressing immune effector cells (e.g., CD4+ T cells and/or CD8+ T cells) (e.g., CAR-expressing CD4+ cells and/or CD8+ T cells) compared to the percentage of PD-1 or LAG-3 expressing immune effector cells from a responder.

[0840] In one embodiment, a non-responder has, or is identified as having, a greater percentage of immune cells having an exhausted phenotype, e.g., immune cells that co-express at least two exhaustion markers, e.g., co-expresses PD-1, PD-L1 and/or TIM-3. In other embodiments, a non-responder has, or is identified as having, a greater percentage of immune cells having an exhausted phenotype, e.g., immune cells that co-express at least two exhaustion markers, e.g., co-expresses PD-1 and LAG-3. In some embodiments of any of the methods disclosed herein, a non-responder has, or is identified as having, a greater percentage of PD-1/PD-L1+/LAG-3+ cells in the CAR-expressing cell population (e.g., a BCMACAR+ cell population) compared to a responder (e.g., a complete responder) to the CAR-expressing cell therapy.

[0841] In some embodiments of any of the methods disclosed herein, a partial responder has, or is identified as having, a higher percentages of PD-1/PD-L1+/LAG-3+ cells, than a responder, in the CAR-expressing cell population (e.g., a BCMACAR+ cell population).

[0842] In some embodiments of any of the methods disclosed herein, a non-responder has, or is identified as having, an exhausted phenotype of PD1/PD-L1+CAR+ and co-expression of LAG3 in the CAR-expressing cell population (e.g., a BCMACAR+ cell population).

[0843] In some embodiments of any of the methods disclosed herein, a non-responder has, or is identified as having, a greater percentage of PD-1/PD-L1+/TIM-3+ cells in the CAR-expressing cell population (e.g., a BCMACAR+ cell population) compared to the responder (e.g., a complete responder).

[0844] In some embodiments of any of the methods disclosed herein, a partial responders has, or is identified as having, a higher percentage of PD-1/PD-L1+/TIM-3+ cells, than responders, in the CAR-expressing cell population (e.g., a BCMACAR+ cell population).

[0845] In some embodiments of any of the methods disclosed herein, the presence of CD8+CD27+CD45RO− T cells in an apheresis sample is a positive predictor of the subject response to a CAR− expressing cell therapy (e.g., a BCMACAR therapy).

[0846] In some embodiments of any of the methods disclosed herein, a high percentage of PD1+CAR+ and LAG3+ or TIM3+ T cells in an apheresis sample is a poor prognostic predictor of the subject response to a CAR-expressing cell therapy (e.g., a BCMACAR therapy).

[0847] In some embodiments of any of the methods disclosed herein, the responder (e.g., the complete or partial responder) has one, two, three or more (or all) of the following profile:

[0848] (i) has a greater number of CD27+ immune effector cells compared to a reference value, e.g., a non-responder number of CD27+ immune effector cells;

[0849] (ii) (i) has a greater number of CD8+ T cells compared to a reference value, e.g., a non-responder number of CD8+ T cells;

[0850] (iii) has a lower number of immune cells expressing one or more checkpoint inhibitors, e.g., a checkpoint inhibitor chosen from PD-1, PD-L1, LAG-3, TIM-3, or KLRG-1, or a combination, compared to a reference value, e.g., a non-responder number of cells expressing one or more checkpoint inhibitors; or

[0851] (iv) has a greater number of one, two, three, four or more (all) of resting TEFF cells, resting TREG cells, naïve CD4 cells, unstimulated memory cells or early memory T cells, or a combination thereof, compared to a reference value, e.g., a non-responder number of resting TEFF cells, resting TREG cells, naïve CD4 cells, unstimulated memory cells or early memory T cells.

[0852] In some embodiments of any of the methods disclosed herein, the cytokine level or activity of (vi) is chosen from one, two, three, four, five, six, seven, eight, or more (or all) of cytokine CCL20/MIP3a, IL17A, IL6, GM-CSF, IFN-γ, IL10, IL13, IL2, IL21, IL4, IL5, IL9 or TNFα, or a combination thereof. The cytokine can be chosen from one, two, three, four or more (all) of IL-17a, CCL20, IL2, IL6, or TNFα. In one embodiment, an increased level or activity of a cytokine is chosen from one or both of IL-17a and CCL20, is indicative of increased responsiveness or decreased relapse.

[0853] In embodiments, the responder, a non-responder, a relapser or a non-relapser identified by the methods herein can be further evaluated according to clinical criteria. For example, a complete responder has, or is identified as, a subject having a disease, e.g., a cancer, who exhibits a complete response, e.g., a complete remission, to a treatment. A complete response may be identified, e.g., using the NCCN Guidelines®, or Cheson et al, J Clin Oncol 17:1244 (1999) and Cheson et al., “Revised Response Criteria for Malignant Lymphoma”, J Clin Oncol 25:579-586 (2007) (both of which are incorporated by reference herein in their entireties), as described herein. A partial responder has, or is identified as, a subject having a disease, e.g., a cancer, who exhibits a partial response, e.g., a partial remission, to a treatment. A partial response may be identified, e.g., using the NCCN Guidelines®, or Cheson criteria as described herein. A non-responder has, or is identified as, a subject having a disease, e.g., a cancer, who does not exhibit a response to a treatment, e.g., the patient has stable disease or progressive disease. A non-responder may be identified, e.g., using the NCCN Guidelines®, or Cheson criteria as described herein.

[0854] Alternatively, or in combination with the methods disclosed herein, responsive to said value, performing one, two, three four or more of:

[0855] administering e.g., to a responder or a non-relapser, a CAR-expressing cell therapy;

[0856] administered an altered dosing of a CAR-expressing cell therapy;

[0857] altering the schedule or time course of a CAR-expressing cell therapy;

[0858] administering, e.g., to a non-responder or a partial responder, an additional agent in combination with a CAR-expressing cell therapy, e.g., a checkpoint inhibitor, e.g., a checkpoint inhibitor described herein;

[0859] administering to a non-responder or partial responder a therapy that increases the number of younger T cells in the subject prior to treatment with a CAR-expressing cell therapy;

[0860] modifying a manufacturing process of a CAR-expressing cell therapy, e.g., enriching for younger T cells prior to introducing a nucleic acid encoding a CAR, or increasing the transduction efficiency, e.g., for a subject identified as a non-responder or a partial responder;

[0861] administering an alternative therapy, e.g., for a non-responder or partial responder or relapser; or

[0862] if the subject is, or is identified as, a non-responder or a relapser, decreasing the TREG cell population and/or T_{REG} gene signature, e.g., by one or more of CD25 depletion, administration of cyclophosphamide, anti-GITR antibody, or a combination thereof.

[0863] In certain embodiments, the subject is pre-treated with an anti-GITR antibody. In certain embodiment, the subject is treated with an anti-GITR antibody prior to infusion or re-infusion.

### Combination Therapies

[0864] A CAR-expressing cell described herein may be used in combination with other known agents and therapies. Administered “in combination”, as used herein, means that two (or more) different treatments are delivered to the subject during the course of the subject's affliction with the disorder, e.g., the two or more treatments are delivered after the subject has been diagnosed with the disorder and before the disorder has been cured or eliminated or treatment has ceased for other reasons. In some embodiments, the delivery of one treatment is still occurring when the delivery of the second begins, so that there is overlap in terms of administration. This is sometimes referred to herein as “simultaneous” or “concurrent delivery”. In other embodiments, the delivery of one treatment ends before the delivery of the other treatment begins. In some embodiments of either case, the treatment is more effective because of combined administration. For example, the second treatment is more effective, e.g., an equivalent effect is seen with less of the second treatment, or the second treatment reduces symptoms to a greater extent, than would be seen if the second treatment were administered in the absence of the first treatment, or the analogous situation is seen with the first treatment. In some embodiments, delivery is such that the reduction in a symptom, or other parameter related to the disorder is greater than what would be observed with one treatment delivered in the absence of the other. The effect of the two treatments can be partially additive, wholly additive, or greater than additive. The delivery can be such that an effect of the first treatment delivered is still detectable when the second is delivered.

[0865] A CAR-expressing cell described herein and the at least one additional therapeutic agent can be administered simultaneously, in the same or in separate compositions, or sequentially. For sequential administration, the CAR-expressing cell described herein can be administered first, and the additional agent can be administered second, or the order of administration can be reversed.

[0866] The CAR therapy and/or other therapeutic agents, procedures or modalities can be administered during periods of active disorder, or during a period of remission or less active disease. The CAR therapy can be administered before the other treatment, concurrently with the treatment, post-treatment, or during remission of the disorder.

[0867] When administered in combination, the CAR therapy and the additional agent (e.g., second or third agent), or all, can be administered in an amount or dose that is higher, lower or the same than the amount or dosage of each agent used individually, e.g., as a monotherapy. In certain embodiments, the administered amount or dosage of the CAR therapy, the additional agent (e.g., second or third agent), or all, is lower (e.g., at least 20%, at least 30%, at least 40%, or at least 50%) than the amount or dosage of each agent used individually, e.g., as a monotherapy. In other embodiments, the amount or dosage of the CAR therapy, the additional agent (e.g., second or third agent), or all, that results in a desired effect (e.g., treatment of cancer) is lower (e.g., at least 20%, at least 30%, at least 40%, or at least 50% lower) than the amount or dosage of each agent used individually, e.g., as a monotherapy, required to achieve the same therapeutic effect.

### Thalidomide Class of Compounds

[0868] In some embodiments, the BCMA CAR-expressing cell therapy is administered in combination with a member of the thalidomide class of compounds. In some embodiments, members of the thalidomide class of compounds include, but are not limited to, lenalidomide (CC-5013), pomalidomide (CC-4047 or ACTIMID), thalidomide, or salts or derivatives thereof. In some embodiments, the compound can be a mixture of one, two, three, or more members of the thalidomide class of compounds. Thalidomide analogs and immunomodulatory properties of thalidomide analogs are described in Bodera and Stankiewicz, Recent Pat Endocr Metab Immune Drug Discov. 2011 September; 5(3):192-6, which is hereby incorporated by reference in its entirety. The structural complex of thalidomide analogs and the E3 ubiquitin is described in Gandhi et al., Br J Haematol. 2014 March; 164(6):811-21, which is hereby incorporated by reference in its entirety. The modulation of the E3 ubiquitin ligase by thalidomide analogs is described in Fischer et al., Nature. 2014 Aug. 7; 512(7512):49-53, which is hereby incorporated by reference in its entirety.

[0869] In some embodiments, the compound comprises a compound of Formula (I):

[chemical structure]

or a pharmaceutically acceptable salt, ester, hydrate, solvate, or tautomer thereof, wherein:

[0870] X is O or S;

[0871] R¹ is C₁-C₆ alkyl, C₂-C₆ alkenyl, C₂-C₆ alkynyl, C₁-C₆ heteroalkyl, carbocyclyl, heterocyclyl, aryl, or heteroaryl, each of which is optionally substituted by one or more R⁴;

[0872] each of R² and R^{2b} is independently hydrogen or C₁-C₆ alkyl; or R² and R^{2b} together with the carbon atom to which they are attached form a carbonyl group or a thiocarbonyl group;

[0873] each of R³ is independently C₁-C₆ alkyl, C₂-C₆ alkenyl, C₂-C₆ alkynyl, C₁-C₆ heteroalkyl, halo, cyano, —C(O)R^{A}, —C(O)OR^{B}, —OR^{B}, —N(R^{C})(R^{D}), —C(O)N(R^{C})(R^{D}), —N(R^{C})C(O)R^{A}, —S(O)ₓR^{E}, —S(O)ₓN(R^{C})(R^{D}), or —N(R^{C})S(O)ₓR^{E}, wherein each alkyl, alkenyl, alkynyl, and heteroalkyl is independently and optionally substituted with one or more R⁶;

[0874] each R⁴ is independently C₁-C₆ alkyl, C₂-C₆ alkenyl, C₂-C₆ alkynyl, C₁-C₆ heteroalkyl, halo, cyano, oxo, —C(O)R^{A}, —C(O)OR^{B}, —OR^{B}, —N(R^{C})(R^{D}), —C(O)N(R^{C})(R^{D}), —N(R^{C})C(O)R^{A}, —S(o)ₓR^{E}, —S(O)ₓN(R^{C})(R^{D}), —N(R^{C})S(O)ₓ(R^{E}, carbocyclyl, heterocyclyl, aryl, or heteroaryl, wherein each alkyl, alkenyl, alkynyl, heteroalkyl, carbocyclyl, heterocyclyl, aryl, and heteroaryl is independently and optionally substituted with one or more IV;

[0875] each of R^{A}, R^{B}, R^{C}, R^{D}, and R^{E} is independently hydrogen or C₁-C₆ alkyl;

[0876] each R⁶ is independently C₁-C₆ alkyl, oxo, cyano, —OR^{B}, —N(R^{C})(R^{D}), —C(O)N(R^{C})(R^{D}), —N(R^{C})C(O)R^{A}, aryl, or heteroaryl, wherein each aryl and heteroaryl is independently and optionally substituted with one or more R⁸;

[0877] each R⁷ is independently halo, oxo, cyano, —OR^{B}, —N(R^{C})(R^{D}), —C(O)N(R^{C})(R^{D}), or —N(R^{C})C(O)R^{A};

[0878] each R⁸ is independently C₁-C₆ alkyl, cyano, —OR^{B}, —N(R^{C})(R^{D}), —C(O)N(R^{C})(R^{D}), or —N(R^{C})C(O)R^{A};

[0879] n is 0, 1, 2, 3 or 4; and

[0880] x is 0, 1, or 2.

[0881] In some embodiments, X is O.

[0882] In some embodiments, R¹ is heterocyclyl. In some embodiments, R¹ is a 6-membered heterocyclyl or a 5-membered heterocyclyl. In some embodiments, R¹ is a nitrogen-containing heterocyclyl. In some embodiments, R¹ is piperidinyl (e.g., piperidine-2,6-dionyl).

[0883] In some embodiments, each of R^{2a} and R^{2b} is independently hydrogen. In some embodiments, R^{2a} and R^{2b} together with the carbon to which they are attached form a carbonyl group.

[0884] In some embodiments, R³ is C₁-C₆ heteroalkyl, —N(R^{C})(R^{D}) or —N(R^{C})C(O)R^{A}. In some embodiments, R³ is C₁-C₆ heteroalkyl (e.g., CH₂NHC(O)CH₂-phenyl-t-butyl), —N(R^{C})(R^{D}) (e.g., NH₂), or —N(R^{C})C(O)R^{A} (e.g., NHC(O)CH₃).

[0885] In an embodiment, X is O. In an embodiment, R¹ is heterocyclyl (e.g., piperidine-2,6-dionyl). In an embodiment, each of R^{2a} and R^{2b} is independently hydrogen. In an embodiment, n is 1. In an embodiment, R³ is —N(R^{C})(R^{D}) (e.g., —NH₂). In an embodiment, the compound comprises lenalidomide, e.g., 3-(4-amino-1-oxoisoindolin-2-yl)piperidine-2,6-dione, or a pharmaceutically acceptable salt thereof. In an embodiment, the compound is lenalidomide, e.g., according to the following formula:

[chemical structure]

[0886] In an embodiment, X is O. In an embodiment, R¹ is heterocyclyl (e.g., piperidinyl-2,6-dionyl). In some embodiments, R^{2a} and R^{2b} together with the carbon to which they are attached form a carbonyl group. In an embodiment, n is 1. In an embodiment, R³ is —N(R^{C})(R^{D}) (e.g., —NH₂). In an embodiment, the compound comprises pomalidomide, e.g., 4-amino-2-(2,6-dioxopiperidin-3-yl)isoindoline-1,3-dione, or a pharmaceutically acceptable salt thereof. In an embodiment, the compound is pomalidomide, e.g., according to the following formula:

[chemical structure]

[0887] In an embodiment, X is O. In an embodiment, R¹ is heterocyclyl (e.g., piperidinyl-2,6-dionyl). In an embodiment, R^{2a} and R^{2b} together with the carbon to which they are attached form a carbonyl group. In an embodiment, n is 0. In an embodiment, the compound comprises thalidomide, e.g., 2-(2,6-dioxopiperidin-3-yl)isoindoline-1,3-dione, or a pharmaceutically acceptable salt thereof. In an embodiment, the product is thalidomide, e.g., according to the following formula:

[chemical structure]

[0888] In an embodiment, X is O. In an embodiment, R¹ is heterocyclyl (e.g., piperidine-2,6-dionyl). In an embodiment, each of R^{2a} and R^{2b} is independently hydrogen. In an embodiment, n is 1. In an embodiment, R³ is C₁-C₆ heteroalkyl (e.g., CH₂NHC(O)CH₂-phenyl-t-butyl) In an embodiment, the compound comprises 2-(4-(tert-butyl)phenyl)-N-((2-(2,6-dioxopiperidin-3-yl)-1-oxoisoindolin-5-yl)methyl)acetamide, or a pharmaceutically acceptable salt thereof. In an embodiment, the compound has the structure as shown in the following formula:

[chemical structure]

[0889] In some embodiments, the compound is a compound of Formula (I-a):

[chemical structure]

or a pharmaceutically acceptable salt, ester, hydrate, or tautomer thereof, wherein:

[0890] Ring A is carbocyclyl, heterocyclyl, aryl, or heteroaryl, each of which optionally substituted with one or more R⁴;

[0891] M is absent, C₁-C₆ alkyl, C₂-C₆ alkenyl, C₂-C₆ alkynyl, or C₁-C₆ heteroalkyl, wherein each alkyl, alkenyl, alkynyl, and heteroalkyl is optionally substituted with one or more R⁴;

[0892] each of R^{2a} and R^{2b} is independently hydrogen or C₁-C₆ alkyl; or R^{2a} and R^{2b} together with the carbon atom to which they are attached to form a carbonyl group or thiocarbonyl group;

[0893] R^{3a} is hydrogen, C₁-C₆ alkyl, C₂-C₆ alkenyl, C₂-C₆ alkynyl, C₁-C₆ heteroalkyl, halo, cyano, —C(O)R^{A}, —C(O)OR^{B}, —OR^{B}, —N(R^{C})(R^{D}), —C(O)N(R^{C})(R^{D}), —N(R^{C})C(O)R^{A}, —S(O)ₓR^{E}, —S(O)—N(R^{C})(R^{D}), or —N(R^{C})S(O)ₓR^{E}, wherein each alkyl, alkenyl, alkynyl, and heteroalkyl is optionally substituted with one or more R⁶;

[0894] each of R³ is independently C₁-C₆ alkyl, C₂-C₆ alkenyl, C₂-C₆ alkynyl, C₁-C₆ heteroalkyl, halo, cyano, —C(O)R^{A}, —C(O)OR^{B}, —OR^{B}, —N(R^{C})(R^{D}), —C(O)N(R^{C})(R^{D}), —N(R^{C})C(O)R^{A}, —S(O)ₓR^{E}, —S(O)ₓN(R^{C})(R^{D}), or —N(R^{C})S(O)ₓR^{E}, wherein each alkyl, alkenyl, alkynyl, and heteroalkyl is independently and optionally substituted with one or more R⁶;

[0895] each R⁴ is independently C₁-C₆ alkyl, C₂-C₆ alkenyl, C₂-C₆ alkynyl, C₁-C₆ heteroalkyl, halo, cyano, oxo, —C(O)R^{A}, —C(O)OR^{B}, —OR^{B}, —N(R^{C})(R^{D}), —C(O)N(R^{C})(R^{D}), —N(R^{C})C(O)R^{A}, S(O)ₓR^{E}, —S(O)ₓN(R^{C})(R^{D}), —N(R^{C})S(O)ₓR^{E}, carbocyclyl, heterocyclyl, aryl, or heteroaryl, wherein each alkyl, alkenyl, alkynyl, carbocyclyl, heterocyclyl, aryl, or heteroaryl is independently and optionally substituted with one or more IV;

[0896] each of R^{A}, R^{B}, R^{C}, R^{D}, and R^{E} is independently hydrogen or C₁-C₆ alkyl;

[0897] each R⁶ is independently C₁-C₆ alkyl, oxo, cyano, —OR^{B}, —N(R^{C})(R^{D}), —C(O)N(R^{C})(R^{D}), —N(R^{C})C(O)R^{A}, aryl, or heteroaryl, wherein each aryl or heteroaryl is independently and optionally substituted with one or more R⁸;

[0898] each R⁷ is independently halo, oxo, cyano, —OR^{B}, —N(R^{C})(R^{D}), —C(O)N(R^{C})(R^{D}), or —N(R^{C})C(O)R^{A};

[0899] each R⁸ is independently C₁-C₆ alkyl, cyano, —OR^{B}, —N(R^{C})(R^{D}), —C(O)N(R^{C})(R^{D}), or —N(R^{C})C(O)R^{A};

[0900] n is 0, 1, 2, or 3;

[0901] o is 0, 1, 2, 3, 4, or 5; and

[0902] x is 0, 1, or 2.

[0903] In some embodiments, X is O.

[0904] In some embodiments, M is absent.

[0905] In some embodiments, Ring A is heterocyclyl. In some embodiments, Ring A is heterocyclyl, e.g., a 6-membered heterocyclyl or a 5-membered heterocyclyl. In some embodiments, Ring A is a nitrogen-containing heterocyclyl. In some embodiments, Ring A is piperidinyl (e.g., piperidine-2,6-dionyl).

[0906] In some embodiments, M is absent and Ring A is heterocyclyl (e.g., piperidinyl, e.g., piperidine-2,6-dionyl).

[0907] In some embodiments, each of R^{2a} and R^{2b} is independently hydrogen. In some embodiments, R^{2a} and R^{2b} together with the carbon to which they are attached form a carbonyl group.

[0908] In some embodiments, R^{1a} is hydrogen, —N(R^{C})(R^{D}) or —N(R^{C})C(O)R^{A}. In some embodiments, R^{1a} is hydrogen. In some embodiments, R^{1a} is —N(R^{C})(R^{D}) (e.g., —NH₂). In some embodiments, R^{1a} is —N(R^{C})C(O)R^{A} (e.g, NHC(O)CH₃).

[0909] In some embodiments, R³ is C₁-C₆ heteroalkyl (e.g., CH₂NHC(O)CH₂-phenyl-t-butyl). In some embodiments, n is 0 or 1. In some embodiments, n is 0. In some embodiments, n is 1.

[0910] The compound may comprise one or more chiral centers or exist as one or more stereoisomers. In some embodiments, the compound comprises a single chiral center and is a mixture of stereoisomers, e.g., an R stereoisomer and an S stereoisomer. In some embodiments, the mixture comprises a ratio of R stereoisomers to S stereoisomers, for example, about a 1:1 ratio of R stereoisomers to S stereoisomers (i.e., a racemic mixture). In some embodiments, the mixture comprises a ratio of R stereoisomers to S stereoisomers of about 51:49, about 52: 48, about 53:47, about 54:46, about 55:45, about 60:40, about 65:35, about 70:30, about 75:25, about 80:20, about 85:15, about 90:10, about 95:5, or about 99:1. In some embodiments, the mixture comprises a ratio of S stereoisomers to R stereoisomers of about 51:49, about 52: 48, about 53:47, about 54:46, about 55:45, about 60:40, about 65:35, about 70:30, about 75:25, about 80:20, about 85:15, about 90:10, about 95:5, or about 99:1. In some embodiments, the compound is a single stereoisomer of Formula (I) or Formula (I-a), e.g., a single R stereoisomer or a single S stereoisomer.

### Kinase Inhibitors

[0911] In some embodiments, the BCMA CAR-expressing cell therapy is administered in combination with a kinase inhibitor. In one embodiment, the kinase inhibitor is a CDK4 inhibitor, e.g., a CDK4 inhibitor described herein, e.g., a CDK4/6 inhibitor, such as, e.g., 6-Acetyl-8-cyclopentyl-5-methyl-2-(5-piperazin-1-yl-pyridin-2-ylamino)-8H-pyrido[2,3-d]pyrimidin-7-one, hydrochloride (also referred to as palbociclib or PD0332991). In one embodiment, the kinase inhibitor is a BTK inhibitor, e.g., a BTK inhibitor described herein, such as, e.g., ibrutinib. In one embodiment, the kinase inhibitor is an mTOR inhibitor, e.g., an mTOR inhibitor described herein, such as, e.g., rapamycin, a rapamycin analog, OSI-027. The mTOR inhibitor can be, e.g., an mTORC1 inhibitor and/or an mTORC2 inhibitor, e.g., an mTORC1 inhibitor and/or mTORC2 inhibitor described herein. In one embodiment, the kinase inhibitor is a MNK inhibitor, e.g., a MNK inhibitor described herein, such as, e.g., 4-amino-5-(4-fluoroanilino)-pyrazolo [3,4-d] pyrimidine. The MNK inhibitor can be, e.g., a MNK1a, MNK1b, MNK2a and/or MNK2b inhibitor. In one embodiment, the kinase inhibitor is a dual PI3K/mTOR inhibitor described herein, such as, e.g., PF-04695102. In one embodiment, the kinase inhibitor is a DGK inhibitor, e.g., a DGK inhibitor described herein, such as, e.g., DGKinh1 (D5919) or DGKinh2 (D5794).

[0912] In one embodiment, the kinase inhibitor is a BTK inhibitor selected from ibrutinib (PCI-32765); GDC-0834; RN-486; CGI-560; CGI-1764; HM-71224; CC-292; ONO-4059; CNX-774; and LFM-A13. In a preferred embodiment, the BTK inhibitor does not reduce or inhibit the kinase activity of interleukin-2-inducible kinase (ITK), and is selected from GDC-0834; RN-486; CGI-560; CGI-1764; HM-71224; CC-292; ONO-4059; CNX-774; and LFM-A13.

[0913] In one embodiment, the kinase inhibitor is a BTK inhibitor, e.g., ibrutinib (PCI-32765). In embodiments, a CAR-expressing cell described herein is administered to a subject in combination with a BTK inhibitor (e.g., ibrutinib). In embodiments, a CAR-expressing cell described herein is administered to a subject in combination with ibrutinib (also called PCI-32765). The structure of ibrutinib (1-[(3R)-3-[4-Amino-3-(4-phenoxyphenyl)-1H-pyrazolo[3,4-d]pyrimidin-1-yl]piperidin-1-yl]prop-2-en-1-one) is shown below.

[chemical structure]

[0914] In embodiments, the subject has CLL, mantle cell lymphoma (MCL), or small lymphocytic lymphoma (SLL). For example, the subject has a deletion in the short arm of chromosome 17 (del(17p), e.g., in a leukemic cell). In other examples, the subject does not have a del(17p). In embodiments, the subject has relapsed CLL or SLL, e.g., the subject has previously been administered a cancer therapy (e.g., previously been administered one, two, three, or four prior cancer therapies). In embodiments, the subject has refractory CLL or SLL. In other embodiments, the subject has follicular lymphoma, e.g., relapse or refractory follicular lymphoma. In some embodiments, ibrutinib is administered at a dosage of about 300-600 mg/day (e.g., about 300-350, 350-400, 400-450, 450-500, 500-550, or 550-600 mg/day, e.g., about 420 mg/day or about 560 mg/day), e.g., orally. In embodiments, the ibrutinib is administered at a dose of about 250 mg, 300 mg, 350 mg, 400 mg, 420 mg, 440 mg, 460 mg, 480 mg, 500 mg, 520 mg, 540 mg, 560 mg, 580 mg, 600 mg (e.g., 250 mg, 420 mg or 560 mg) daily for a period of time, e.g., daily for 21 day cycle cycle, or daily for 28 day cycle. In one embodiment, 1, 2, 3, 4, 5, 6, 7, 8, 9, 10, 11, 12 or more cycles of ibrutinib are administered. In some embodiments, ibrutinib is administered in combination with rituximab. See, e.g., Burger et al. (2013) Ibrutinib In Combination With Rituximab (iR) Is Well Tolerated and Induces a High Rate Of Durable Remissions In Patients With High-Risk Chronic Lymphocytic Leukemia (CLL): New, Updated Results Of a Phase II Trial In 40 Patients, Abstract 675 presented at 55^{th} ASH Annual Meeting and Exposition, New Orleans, La. 7-10 December Without being bound by theory, it is thought that the addition of ibrutinib enhances the T cell proliferative response and may shift T cells from a T-helper-2 (Th2) to T-helper-1 (Th1) phenotype. Th1 and Th2 are phenotypes of helper T cells, with Th1 versus Th2 directing different immune response pathways. A Th1 phenotype is associated with proinflammatory responses, e.g., for killing cells, such as intracellular pathogens/viruses or cancerous cells, or perpetuating autoimmune responses. A Th2 phenotype is associated with eosinophil accumulation and anti-inflammatory responses.

### EGFR Inhibitors

[0915] In some embodiments, the BCMA CAR-expressing cell therapy is administered in combination with an inhibitor of Epidermal Growth Factor Receptor (EGFR).

[0916] In some embodiments, the EGFR inhibitor is (R,E)-N-(7-chloro-1-(1-(4-(dimethylamino)but-2-enoyl)azepan-3-yl)-1H-benzo[d]imidazol-2-yl)-2-methylisonicotinamide (Compound A40) or a compound disclosed in PCT Publication No. WO 2013/184757.

[0917] In some embodiments, the EGFR inhibitor, (R,E)-N-(7-chloro-1-(1-(4-(dimethylamino)but-2-enoyl)azepan-3-yl)-1H-benzo[d]imidazol-2-yl)-2-methylisonicotinamide (Compound A40), or a compound disclosed in PCT Publication No. WO 2013/184757, is a covalent, irreversible tyrosine kinase inhibitor. In certain embodiments, the EGFR inhibitor, (R,E)-N-(7-chloro-1-(1-(4-(dimethylamino)but-2-enoyl)azepan-3-yl)-1H-benzo[d]imidazol-2-yl)-2-methylisonicotinamide (Compound A40), or a compound disclosed in PCT Publication No. WO 2013/184757 inhibits activating EGFR mutations (L858R, ex19del). In other embodiments, the EGFR inhibitor, (R,E)-N-(7-chloro-1-(1-(4-(dimethylamino)but-2-enoyl)azepan-3-yl)-1H-benzo[d]imidazol-2-yl)-2-methylisonicotinamide (Compound A40), or a compound disclosed in PCT Publication No. WO 2013/184757 does not inhibit, or does not substantially inhibit, wild-type (wt) EGFR. Compound A40 has shown efficacy in EGFR mutant NSCLC patients. In some embodiments, the EGFR inhibitor, (R,E)-N-(7-chloro-1-(1-(4-(dimethylamino)but-2-enoyl)azepan-3-yl)-1H-benzo[d]imidazol-2-yl)-2-methylisonicotinamide (Compound A40), or a compound disclosed in PCT Publication No. WO 2013/184757 also inhibits one or more kinases in the TEC family of kinases. The Tec family kinases include, e.g., ITK, BMX, TEC, RLK, and BTK, and are central in the propogation of T-cell receptor and chemokine receptor signaling (Schwartzberg et al. (2005) Nat. Rev. Immunol. p. 284-95). For example, Compound A40 can inhibit ITK with a biochemical IC50 of 1.3 nM. ITK is a critical enzyme for the survival of Th2 cells and its inhibition results in a shift in the balance between Th2 and Th1 cells. In some embodiments, the EGFR inhibitor is chosen from one of more of erlotinib, gefitinib, cetuximab, panitumumab, necitumumab, PF-00299804, nimotuzumab, or R05083945.

### Adenosine A2A Receptor Inhibitors

[0918] In some embodiments, the BCMA CAR-expressing cell therapy is administered in combination with an adenosine A2a receptor (A2aR) antagonist (e.g., an inhibitor of A2aR pathway, e.g., an adenosine inhibitor, e.g., an inhibitor of A2aR or CD-73). In some embodiments, the A2aR antagonist is chosen from PBF509 (Palobiofarma/Novartis), CPI444/V81444 (Corvus/Genentech), AZD4635/HTL-1071 (AstraZeneca/Heptares), Vipadenant (Redox/Juno), GBV-2034 (Globavir), AB928 (Arcus Biosciences), Theophylline, Istradefylline (Kyowa Hakko Kogyo), Tozadenant/SYN-115 (Acorda), KW-6356 (Kyowa Hakko Kogyo), ST-4206 (Leadiant Biosciences), or Preladenant/SCH 420814 (Merck/Schering).

[0919] In some embodiments, the A2aR antagonist comprises PBF509 or a compound disclosed in U.S. Pat. No. 8,796,284 or in International Application Publication No. WO 2017/025918, herein incorporated by reference in their entirety.

[0920] In some embodiments, the A2aR antagonist comprises a compound of formula (I):

[chemical structure]

[0921] wherein

[0922] R¹represents a five-membered heteroaryl ring selected from the group consisting of a pyrazole, a thiazole, and a triazole ring optionally substituted by one or two halogen atoms or by one or two methyl groups;

[0923] R² represents a hydrogen atom;

[0924] R³ represents bromine or chlorine atom;

[0925] R⁴ represents independently:

[0926] a) a five-membered heteroaryl group optionally substituted by one or more halogen atoms or by one or more groups selected from the group consisting of alkyl, cycloalkyl, alkoxy, alkylthio, amino, mono- or dialkylamino

[0927] b) a group —N(R⁵)(R⁶) in which R⁵ and R⁶ represent independently:

[0928] a hydrogen atom;

[0929] an alkyl or cycloalkyl group of 3 to 6 carbon atoms, linear or branched, optionally substituted by one or more halogen atoms or by one or more groups selected from the group consisting of cycloalkyl (3-8 carbon atoms), hydroxy, alkoxy, amino, mono- and dialkylamino (1-8 carbon atoms);

[0930] or R⁵ and R⁶ form together with the nitrogen atom to that they are attached a saturated heterocyclic group of 4 to 6 members in which further heteroatom may be inserted, which is optionally substituted by one or more halogen atoms or by one or more alkyl groups (1-8 carbon atoms), hydroxy, lower alkoxy, amino, mono- or dialkylamino, or

[0931] c) a group —OR′ or —SR′, where R⁷ represents independently:

[0932] an alkyl (1-8 carbon atoms) or cycloalkyl (3-8 carbon atoms) group, linear or branched, optionally substituted by one or more halogen atoms or by one or more groups selected from the group consisting of alkyl (1-8 carbon atoms), alkoxy (1-8 carbon atoms), amino, mono- or dialkylamino (1-8 carbon atoms); or

[0933] a Phenyl ring optionally substituted with one or more halogen atoms.

[0934] In certain embodiments, the A2aR antagonist comprises 5-bromo-2,6-di-(1H-pyrazol-1-yl)pyrimidin-4-amine

[0935] In certain embodiments, the A2AR antagonist comprises CPI444/V81444. CPI-444 and other A2aR antagonists are disclosed in International Application Publication No. WO 2009/156737, herein incorporated by reference in its entirety. In certain embodiments, the A2aR antagonist is (S)-7-(5-methylfuran-2-yl)-3-((6-(((tetrahydrofuran-3-yl)oxy)methyl)pyridin-2-yl)methyl)-3H-[1,2,3]triazolo[4,5-d]pyrimidin-5-amine. In certain embodiments, the A2aR antagonist is (R)-7-(5-methylfuran-2-yl)-3-((6-(((tetrahydrofuran-3-yl)oxy)methyl)pyridin-2-yl)methyl)-3H-[1,2,3]triazolo[4,5-d]pyrimidin-5-amine, or racemate thereof. In certain embodiments, the A2aR antagonist is 7-(5-methylfuran-2-yl)-3-((6-(((tetrahydrofuran-3-yl)oxy)methyl)pyridin-2-yl)methyl)-3H-[1,2,3]triazolo[4,5-d]pyrimidin-5-amine

[0936] In certain embodiments, the A2aR antagonist is AZD4635/HTL-1071. A2aR antagonists are disclosed in International Application Publication No. WO 2011/095625, herein incorporated by reference in its entirety. In certain embodiments, the A2aR antagonist is 6-(2-chloro-6-methylpyridin-4-yl)-5-(4-fluorophenyl)-1,2,4-triazin-3-amine.

[0937] In certain embodiments, the A2aR antagonist is ST-4206 (Leadiant Biosciences). In certain embodiments, the A2aR antagonist is an A2aR antagonist described in U.S. Pat. No. 9,133,197, herein incorporated by reference in its entirety.

[0938] In certain embodiments, the A2AR antagonist is an A2aR antagonist described in U.S. Pat. Nos. 8,114,845 and 9,029,393, U.S. Application Publication Nos. 2017/0015758 and 2016/0129108, herein incorporated by reference in their entirety.

[0939] In some embodiments, the A2aR antagonist is istradefylline (CAS Registry Number: 155270-99-8). Istradefylline is also known as KW-6002 or 8-[(E)-2-(3,4-dimethoxyphenyl)vinyl]-1,3-diethyl-7-methyl-3,7-dihydro-1H-purine-2,6-dione. Istradefylline is disclosed, e.g., in LeWitt et al. (2008) Annals of Neurology 63 (3): 295-302).

[0940] In some embodiments, the A2aR antagonist is tozadenant (Biotie). Tozadenant is also known as SYN115 or 4-hydroxy-N-(4-methoxy-7-morpholin-4-yl-1,3-benzothiazol-2-yl)-4-methylpiperidine-1-carboxamide. Tozadenant blocks the effect of endogenous adenosine at the A2a receptors, resulting in the potentiation of the effect of dopamine at the D2 receptor and inhibition of the effect of glutamate at the mGluR5 receptor. In some embodiments, the A2aR antagonist is preladenant (CAS Registry Number: 377727-87-2). Preladenant is also known as SCH 420814 or 2-(2-Furanyl)-7-[2-[4-[4-(2-methoxyethoxy)phenyl]-1-piperazinyl]ethyl]7H-pyrazolo[4,3-e][1,2,4]triazolo[1,5-c]pyrimidine-5-amine Preladenant was developed as a drug that acted as a potent and selective antagonist at the adenosine A2A receptor.

[0941] In some embodiments, the A2aR antagonist is vipadenan. Vipadenan is also known as BIIB014, V2006, or 3-[(4-amino-3-methylphenyl)methyl]-7-(furan-2-yl)triazolo[4,5-d]pyrimidin-5-amine

[0942] Other exemplary A2aR antagonists include, e.g., ATL-444, MSX-3, SCH-58261, SCH-412,348, SCH-442,416, VER-6623, VER-6947, VER-7835, CGS-15943, or ZM-241,385.

### IDO/TDO Inhibitors

[0943] In some embodiments, the BCMA CAR-expressing cell therapy is administered in combination with an inhibitor of indoleamine 2,3-dioxygenase (IDO) and/or tryptophan 2,3-dioxygenase (TDO). In some embodiments, the IDO inhibitor is chosen from (4E)-4-[(3-chloro-4-fluoroanilino)-nitrosomethylidene]-1,2,5-oxadiazol-3-amine (also known as epacadostat or INCB24360), indoximod (NLG8189), (1-methyl-D-tryptophan), α-cyclohexyl-5H-Imidazo[5,1-a]isoindole-5-ethanol (also known as NLG919), indoximod, BMS-986205 (formerly F001287).

[0944] In some embodiments, the IDO/TDO inhibitor is indoximod (New Link Genetics). Indoximod, the D isomer of 1-methyl-tryptophan, is an orally administered small-molecule indoleamine 2,3-dioxygenase (IDO) pathway inhibitor that disrupts the mechanisms by which tumors evade immune-mediated destruction.

[0945] In some embodiments, the IDO/TDO inhibitor is NLG919 (New Link Genetics). NLG919 is a potent IDO (indoleamine-(2,3)-dioxygenase) pathway inhibitor with Ki/EC50 of 7 nM/75 nM in cell-free assays.

[0946] In some embodiments, the IDO/TDO inhibitor is epacadostat (CAS Registry Number: 1204669-58-8). Epacadostat is also known as INCB24360 or INCB024360 (Incyte). Epacadostat is a potent and selective indoleamine 2,3-dioxygenase (IDO1) inhibitor with IC50 of 10 nM, highly selective over other related enzymes such as IDO2 or tryptophan 2,3-dioxygenase (TDO).

[0947] In some embodiments, the IDO/TDO inhibitor is F001287 (Flexus/BMS). F001287 is a small molecule inhibitor of indoleamine 2,3-dioxygenase 1 (IDO1).

### CD19 CAR

[0948] In some embodiments, the BCMA CAR-expressing cell therapy is administered in combination with a CD19 CAR-expressing cell therapy.

[0949] In one embodiment, the antigen binding domain of the CD19 CAR has the same or a similar binding specificity as the FMC63 scFv fragment described in Nicholson et al. Mol. Immun 34 (16-17): 1157-1165 (1997). In one embodiment, the antigen binding domain of the CD19 CAR includes the scFv fragment described in Nicholson et al. Mol. Immun. 34 (16-17): 1157-1165 (1997).

[0950] In some embodiments, the CD19 CAR includes an antigen binding domain (e.g., a humanized antigen binding domain) according to Table 3 of WO2014/153270, incorporated herein by reference.

[0951] WO2014/153270 also describes methods of assaying the binding and efficacy of various CAR constructs.

[0952] In one aspect, the parental murine scFv sequence is the CAR19 construct provided in PCT publication WO2012/079000 (incorporated herein by reference). In one embodiment, the anti-CD19 binding domain is a scFv described in WO2012/079000.

[0953] In one embodiment, the CAR molecule comprises the fusion polypeptide sequence provided as SEQ ID NO: 12 in PCT publication WO2012/079000, which provides an scFv fragment of murine origin that specifically binds to human CD19.

[0954] In one embodiment, the CD19 CAR comprises an amino acid sequence provided as SEQ ID NO: 12 in PCT publication WO2012/079000. In embodiment, the amino acid sequence is

(SEQ ID NO: 2029)
(MALPVTALLLPLALLLHAARP)diqmtqttsslsaslgdrvtiscrasq
diskylnwyqqkpdgtvklliyhtsrlhsgvpsrfsgsgsgtdysitisn
leqediatyfcqqgntlpytfgggtkleitggggsggggsggggsevklq
esgpglvapsqslsvtctvsgvslpdygvswirqpprkglewlgviwgse
ttyynsalksrltiikdnsksqvflkmnslqtddtaiyycakhyyyggsy
amdywgqgtsvtvsstapaprpptpaptiasqplslrpeacrpaaggavh
trgldfacdiyiwaplagtcgvlllslvitlyckrgrkkllyifkqpfmr
pvqttqeedgcscrfpeeeeggcelrvkfsrsadapaykqgqnqlyneln
lgrreeydvldlargrdpemggkprrknpqeglynelqkdkmaeayseig
mkgeragkghdglyqglstatkdtydalhmqalppr,

or a sequence substantially homologous thereto. The optional sequence of the signal peptide is shown in capital letters and parenthesis.

[0955] In one embodiment, the amino acid sequence is:

(SEQ ID NO: 2030)
Diqmtqttsslsaslgdrvtiscrasqdiskylnwyqqkpdgtvklliyh
tsrlhsgvpsrfsgsgsgtdysltisnleqediatyfcqqgntlpytfgg
gtkleitggggsggggsggggsevklqesgpglvapsqslsvtctvsgvs
lpdygvswirqpprkglewlgviwgsettyynsalksrltiikdnsksqv
flkmnslqtddtaiyycakhyyyggsyamdywgqgtsvtvsstapaprpp
tpaptiasqplslrpeacrpaaggavhtrgldfacdiyiwaplagtcgvl
llslvitlyckrgrkkllyifkqpfmrpvqttqeedgcscrfpeeeeggc
elrvkfsrsadapaykqgqnqlynelnlgrreeydvldkagrdpemggkp
rrknpqeglynelqkdkmaeayseigmkgeragkghdglyqglstatkdt
ydalhmqalppr,

or a sequence substantially homologous thereto.

[0956] In one embodiment, the CD19 CAR has the USAN designation TISAGENLECLEUCEL-T. In embodiments, CTL019 is made by a gene modification of T cells is mediated by stable insertion via transduction with a self-inactivating, replication deficient Lentiviral (LV) vector containing the CTL019 transgene under the control of the EF-1 alpha promoter. CTL019 can be a mixture of transgene positive and negative T cells that are delivered to the subject on the basis of percent transgene positive T cells.

[0957] In other embodiments, the CD19 CAR comprises an antigen binding domain (e.g., a humanized antigen binding domain) according to Table 3 of WO2014/153270, incorporated herein by reference.

[0958] Humanization of murine CD19 antibody is desired for the clinical setting, where the mouse-specific residues may induce a human-anti-mouse antigen (HAMA) response in patients who receive CART19 treatment, i.e., treatment with T cells transduced with the CAR19 construct. The production, characterization, and efficacy of humanized CD19 CAR sequences is described in International Application WO2014/153270 which is herein incorporated by reference in its entirety, including Examples 1-5 (p. 115-159).

[0959] In some embodiments, CD19 CAR constructs are described in PCT publication WO 2012/079000, incorporated herein by reference, and the amino acid sequence of the murine CD19 CAR and scFv constructs are shown in Table 8 below, or a sequence substantially identical to any of the aforesaid sequences (e.g., at least 85%, 90%, 95% or more identical to any of the sequences described herein).

TABLE 8
CD19 CAR Constructs

| SEQ ID NO | Region |
|---|---|
| CTL019 | |
| 1300 | CTL019 Full amino acid sequence |
| 1301 | CTL019 Full nucleotide sequence |
| 1302 | CTL019 scFv domain |
| mCAR1 | |
| 1303 | mCAR1 scFv |
| 1304 | mCAR1 Full amino acid sequence |
| mCAR2 | |
| 1305 | mCAR2 scFv |
| 1306 | mCAR2 amino acid sequence |
| 1307 | mCAR2 full amino acid sequence |
| mCAR3 | |
| 1308 | mCAR3 scFv |
| 1309 | mCAR3 full amino acid sequence |
| SSJ25-C1 | |
| 1310 | SSJ25-C1 VH sequence |
| 1311 | SSJ25-C1 VL |
| Humanized CAR1 | |
| 1312 | CAR1 scFv domain |
| 1313 | CAR 1 - Full - aa |
| Humanized CAR2 | |
| 1314 | CAR2 scFv domain - aa (Linker is underlined) |
| 1315 | CAR2 scFv domain - nt |
| 1316 | CAR 2 - Full - aa |
| 1317 | CAR 2 - Full - nt |
| 1318 | CAR2 - Soluble scFv - aa |
| Humanized CAR3 | |
| 1319 | CAR3 scFv domain |
| 1320 | CAR 3 - Full - aa |
| Humanized CAR4 | |
| 1321 | CAR4 scFv domain |
| 1322 | CAR 4 - Full - aa |
| Humanized CAR5 | |
| 1323 | CAR5 scFv domain |
| 1324 | CAR 5 - Full - aa |
| Humanized CAR6 | |
| 1325 | CAR6 scFv domain |
| 1326 | CAR6 -Full - aa |
| Humanized CAR7 | |
| 1327 | CAR7 scFv domain |
| 1328 | CAR 7 Full - aa |
| Humanized CAR8 | |
| 1329 | CAR8 scFv domain |
| 1330 | CAR 8 - Full - aa |
| Humanized CAR9 | |
| 1331 | CAR9 scFv domain |
| 1332 | CAR 9 - Full - aa |
| Humanized CAR10 | |
| 1333 | CAR10 scFv domain |
| 1334 | CAR 10 Full - aa |
| Humanized CAR11 | |
| 1335 | CAR11 scFv domain |
| 1336 | CAR 11 Full - aa |
| Humanized CAR12 | |
| 1337 | CAR12 scFv domain |
| 1338 | CAR 12 - Full - aa |
| Murine CART19 | |
| 1339 | HCDR1 (Kabat) |
| 1340 | HCDR2 (Kabat) |
| 1341 | HCDR3 (Kabat) |
| 1342 | LCDR1 (Kabat) |
| 1343 | LCDR2 (Kabat) |
| 1344 | LCDR3 (Kabat) |
| Humanized CART19 a | |
| 1345 | HCDR1 (Kabat) |
| 1346 | HCDR2 (Kabat) |
| 1347 | HCDR3 (Kabat) |
| 1348 | LCDR1 (Kabat) |
| 1349 | LCDR2 (Kabat) |
| 1350 | LCDR3 (Kabat) |
| Humanized CART19 b | |
| 1351 | HCDR1 (Kabat) |
| 1352 | HCDR2 (Kabat) |
| 1353 | HCDR3 (Kabat) |
| 1354 | LCDR1 (Kabat) |
| 1355 | LCDR2 (Kabat) |
| 1356 | LCDR3 (Kabat) |
| Humanized CART19 c | |
| 1357 | HCDR1 (Kabat) |
| 1358 | HCDR2 (Kabat) |
| 1359 | HCDR3 (Kabat) |
| 1360 | LCDR1 (Kabat) |
| 1361 | LCDR2 (Kabat) |
| 1362 | LCDR3 (Kabat) |

[0960] CD19 CAR constructs containing humanized anti-CD19 scFv domains are described in PCT publication WO 2014/153270, incorporated herein by reference.

[0961] The sequences of murine and humanized CDR sequences of the anti-CD19 scFv domains are shown in Table 9 for the heavy chain variable domains and in Table 10 for the light chain variable domains. The SEQ ID NOs refer to those found in Table 8.

TABLE 9
Heavy Chain Variable Domain CDR (Kabat) SEQ ID NO's of CD19 Antibodies

| Candidate | HCDR1 | HCDR2 | HCDR3 |
|---|---|---|---|
| murine_CART19 | SEQ ID NO: 1339 | SEQ ID NO: 1340 | SEQ ID NO: 1341 |
| humanized_CART19 a | SEQ ID NO: 1345 | SEQ ID NO: 1346 | SEQ ID NO: 1347 |
| humanized_CART19 b | SEQ ID NO: 1351 | SEQ ID NO: 1352 | SEQ ID NO: 1353 |
| humanized_CART19 c | SEQ ID NO: 1357 | SEQ ID NO: 1358 | SEQ ID NO: 1359 |

TABLE 10
Light Chain Variable Domain CDR (Kabat) SEQ ID NO's of CD19 Antibodies

| Candidate | LCDR1 | LCDR2 | LCDR3 |
|---|---|---|---|
| murine_CART19 | SEQ ID NO: 1342 | SEQ ID NO: 1343 | SEQ ID NO: 1344 |
| humanized_CART19 a | SEQ ID NO: 1348 | SEQ ID NO: 1349 | SEQ ID NO: 1350 |
| humanized_CART19 b | SEQ ID NO: 1354 | SEQ ID NO: 1355 | SEQ ID NO: 1356 |
| humanized_CART19 c | SEQ ID NO: 1360 | SEQ ID NO: 1361 | SEQ ID NO: 1362 |

[0962] Any known CD19 CAR, e.g., the CD19 antigen binding domain of any known CD19 CAR, in the art can be used in accordance with the present disclosure. For example, LG-740; CD19 CAR described in the U.S. Pat. Nos. 8,399,645; 7,446,190; Xu et al., Leuk Lymphoma. 2013 54(2):255-260(2012); Cruz et al., Blood 122(17):2965-2973 (2013); Brentjens et al., Blood, 118(18):4817-4828 (2011); Kochenderfer et al., Blood 116(20):4099-102 (2010); Kochenderfer et al., Blood 122 (25):4129-39(2013); and 16th Annu Meet Am Soc Gen Cell Ther (ASGCT) (May 15-18, Salt Lake City) 2013, Abst 10.

[0963] Exemplary CD19 CARs include CD19 CARs described herein, e.g., in one or more tables described herein, or an anti-CD19 CAR described in Xu et al. Blood 123.24(2014):3750-9; Kochenderfer et al. Blood 122.25(2013):4129-39, Cruz et al. Blood 122.17(2013):2965-73, NCT00586391, NCT01087294, NCT02456350, NCT00840853, NCT02659943, NCT02650999, NCT02640209, NCT01747486, NCT02546739, NCT02656147, NCT02772198, NCT00709033, NCT02081937, NCT00924326, NCT02735083, NCT02794246, NCT02746952, NCT01593696, NCT02134262, NCT01853631, NCT02443831, NCT02277522, NCT02348216, NCT02614066, NCT02030834, NCT02624258, NCT02625480, NCT02030847, NCT02644655, NCT02349698, NCT02813837, NCT02050347, NCT01683279, NCT02529813, NCT02537977, NCT02799550, NCT02672501, NCT02819583, NCT02028455, NCT01840566, NCT01318317, NCT01864889, NCT02706405, NCT01475058, NCT01430390, NCT02146924, NCT02051257, NCT02431988, NCT01815749, NCT02153580, NCT01865617, NCT02208362, NCT02685670, NCT02535364, NCT02631044, NCT02728882, NCT02735291, NCT01860937, NCT02822326, NCT02737085, NCT02465983, NCT02132624, NCT02782351, NCT01493453, NCT02652910, NCT02247609, NCT01029366, NCT01626495, NCT02721407, NCT01044069, NCT00422383, NCT01680991, NCT02794961, or NCT02456207, each of which is incorporated herein by reference in its entirety.

### CD20 CAR

[0964] In some embodiments, the BCMA CAR-expressing cell therapy is administered in combination with a CD20 CAR-expressing cell therapy.

[0965] In one embodiment, the CD20 CAR comprises one or more of: LC CDR1, LC CDR2, LC CDR3, HC CDR1, HC CDR2, HC CDR3, VH, VL, an scFv, or full-length sequence of a construct of Tables 11, 12, 13, e.g., CAR20-1, CAR20-2, CAR20-3, CAR20-4, CAR20-5, CAR20-6, CAR20-7, CAR20-8, CAR20-9, CAR20-10, CAR20-11, CAR20-12, CAR20-13, CAR20-14, CAR20-15, or CAR20-16, or a sequence substantially identical thereto (e.g., a sequence sharing 80%, 85%, 90%, or 95% identity thereto). Each full CD20 CAR amino acid sequence in Table 11 includes an optional signal peptide sequence of 21 amino acids corresponding to the amino acid sequence: MALPVTALLLPLALLLHAARP (SEQ ID NO: 2031). Each full CAR nucleotide sequence in Table 11 includes an optional nucleotide signal peptide sequence corresponding to the first 63 nucleotides corresponding to the nucleotide sequence:

(SEQ ID NO: 2032)
ATGGCCCTCCCTGTCACCGCCCTGCTGCTTCCGCTGGCTCTTCTGCTCC
ACGCCGCTCGGCCC.

TABLE 11
CD20 CAR Constructs

| SEQ ID NO: | Ab region |
|---|---|
| CD20-C3H2 | |
| 1363 (Kabat) | HCDR1 |
| 1364 (Kabat) | HCDR2 |
| 1365 (Kabat) | HCDR3 |
| 1366 (Chothia) | HCDR1 |
| 1367 (Chothia) | HCDR2 |
| 1368 (Chothia) | HCDR3 |
| 1369 (IMGT) | HCDR1 |
| 1370 (IMGT) | HCDR2 |
| 1371 (IMGT) | HCDR3 |
| 1372 (Combined Chothia and Kabat) | HCDR1 |
| 1373 (Combined Chothia and Kabat) | HCDR2 |
| 1374 (Combined Chothia and Kabat) | HCDR3 |
| 1375 | VH |
| 1376 | DNA VH |
| 1377 (Kabat) | LCDR1 |
| 1378 (Kabat) | LCDR2 |
| 1379 (Kabat) | LCDR3 |
| 1380 (Chothia) | LCDR1 |
| 1381 (Chothia) | LCDR2 |
| 1382 (Chothia) | LCDR3 |
| 1383 (IMGT) | LCDR1 |
| 1384 (IMGT) | LCDR2 |
| 1385 (IMGT) | LCDR3 |
| 1386 (Combined Chothia and Kabat) | LCDR1 |
| 1387 (Combined Chothia and Kabat) | LCDR2 |
| 1388 (Combined Chothia and Kabat) | LCDR3 |
| 1389 | VL |
| 1390 | DNA VL |
| 1391 | Linker |
| 1392 | scFv (VH-linker-VL) |
| 1393 | DNA scFv (VH-linker-VL) |
| 1394 | Full CAR amino acid sequence |
| 1395 | Full CAR nucleic acid sequence |
| CD20-C5H1 | |
| 1396 (Kabat) | HCDR1 |
| 1397 (Kabat) | HCDR2 |
| 1398 (Kabat) | HCDR3 |
| 1399 (Chothia) | HCDR1 |
| 1400 (Chothia) | HCDR2 |
| 1401 (Chothia) | HCDR3 |
| 1402 (IMGT) | HCDR1 |
| 1403 (IMGT) | HCDR2 |
| 1404 (IMGT) | HCDR3 |
| 1405 (Combined Chothia and Kabat) | HCDR1 |
| 1406 (Combined Chothia and Kabat) | HCDR2 |
| 1407 (Combined Chothia and Kabat) | HCDR3 |
| 1408 | VH |
| 1409 | DNA VH |
| 1410 (Kabat) | LCDR1 |
| 1411 (Kabat) | LCDR2 |
| 1412 (Kabat) | LCDR3 |
| 1413 (Chothia) | LCDR1 |
| 1414 (Chothia) | LCDR2 |
| 1415 (Chothia) | LCDR3 |
| 1416 (IMGT) | LCDR1 |
| 1417 (IMGT) | LCDR2 |
| 1418 (IMGT) | LCDR3 |
| 1419 (Combined Chothia and Kabat) | LCDR1 |
| 1420 (Combined Chothia and Kabat) | LCDR2 |
| 1421 (Combined Chothia and Kabat) | LCDR3 |
| 1422 | VL |
| 1423 | DNA VL |
| 1424 | Linker |
| 1425 | scFv (VH-linker-VL) |
| 1426 | DNA scFv (VH-linker-VL) |
| 1427 | Full CAR amino acid sequence |
| 1428 | Full CAR nucleic acid sequence |
| CD20-C2H1 | |
| 1429 (Kabat) | HCDR1 |
| 1430 (Kabat) | HCDR2 |
| 1431 (Kabat) | HCDR3 |
| 1432 (Chothia) | HCDR1 |
| 1433 (Chothia) | HCDR2 |
| 1434 (Chothia) | HCDR3 |
| 1435 (IMGT) | HCDR1 |
| 1436 (IMGT) | HCDR2 |
| 1437 (IMGT) | HCDR3 |
| 1438 (Combined Chothia and Kabat) | HCDR1 |
| 1439 (Combined Chothia and Kabat) | HCDR2 |
| 1440 (Combined Chothia and Kabat) | HCDR3 |
| 1441 | VH |
| 1442 | DNA VH |
| 1443 (Kabat) | LCDR1 |
| 1444 (Kabat) | LCDR2 |
| 1445 (Kabat) | LCDR3 |
| 1446 (Chothia) | LCDR1 |
| 1447 (Chothia) | LCDR2 |
| 1448 (Chothia) | LCDR3 |
| 1449 (IMGT) | LCDR1 |
| 1450 (IMGT) | LCDR2 |
| 1451 (IMGT) | LCDR3 |
| 1452 (Combined Chothia and Kabat) | LCDR1 |
| 1453 (Combined Chothia and Kabat) | LCDR2 |
| 1454 (Combined Chothia and Kabat) | LCDR3 |
| 1455 | VL |
| 1456 | DNA VL |
| 1457 | Linker |
| 1458 | scFv (VH-linker-VL) |
| 1459 | DNA scFv (VH-linker-VL) |
| 1460 | Full CAR amino acid sequence |
| 1461 | Full CAR nucleic acid sequence |
| CD20-C2H2 | |
| 1462 (Kabat) | HCDR1 |
| 1463 (Kabat) | HCDR2 |
| 1464 (Kabat) | HCDR3 |
| 1465 (Chothia) | HCDR1 |
| 1466 (Chothia) | HCDR2 |
| 1467 (Chothia) | HCDR3 |
| 1468 (IMGT) | HCDR1 |
| 1469 (IMGT) | HCDR2 |
| 1470 (IMGT) | HCDR3 |
| 1471 (Combined Chothia and Kabat) | HCDR1 |
| 1472 (Combined Chothia and Kabat) | HCDR2 |
| 1473 (Combined Chothia and Kabat) | HCDR3 |
| 1474 | VH |
| 1475 | DNA VH |
| 1476 (Kabat) | LCDR1 |
| 1477 (Kabat) | LCDR2 |
| 1478 (Kabat) | LCDR3 |
| 1479 (Chothia) | LCDR1 |
| 1480 (Chothia) | LCDR2 |
| 1481 (Chothia) | LCDR3 |
| 1482 (IMGT) | LCDR1 |
| 1483 (IMGT) | LCDR2 |
| 1484 (IMGT) | LCDR3 |
| 1485 (Combined Chothia and Kabat) | LCDR1 |
| 1486 (Combined Chothia and Kabat) | LCDR2 |
| 1487 (Combined Chothia and Kabat) | LCDR3 |
| 1488 | VL |
| 1489 | DNA VL |
| 1490 | Linker |
| 1491 | scFv (VH-linker-VL) |
| 1492 | DNA scFv (VH-linker-VL) |
| 1493 | Full CAR amino acid sequence |
| 1494 | Full CAR nucleic acid sequence |
| CD20-C2H3 | |
| 1495 (Kabat) | HCDR1 |
| 1496 (Kabat) | HCDR2 |
| 1497 (Kabat) | HCDR3 |
| 1498 (Chothia) | HCDR1 |
| 1499 (Chothia) | HCDR2 |
| 1500 (Chothia) | HCDR3 |
| 1501 (IMGT) | HCDR1 |
| 1502 (IMGT) | HCDR2 |
| 1503 (IMGT) | HCDR3 |
| 1504 (Combined Chothia and Kabat) | HCDR1 |
| 1505 (Combined Chothia and Kabat) | HCDR2 |
| 1506 (Combined Chothia and Kabat) | HCDR3 |
| 1507 | VH |
| 1508 | DNA VH |
| 1509 (Kabat) | LCDR1 |
| 1510 (Kabat) | LCDR2 |
| 1511 (Kabat) | LCDR3 |
| 1512 (Chothia) | LCDR1 |
| 1513 (Chothia) | LCDR2 |
| 1514 (Chothia) | LCDR3 |
| 1515 (IMGT) | LCDR1 |
| 1516 (IMGT) | LCDR2 |
| 1517 (IMGT) | LCDR3 |
| 1518 (Combined Chothia and Kabat) | LCDR1 |
| 1519 (Combined Chothia and Kabat) | LCDR2 |
| 1520 (Combined Chothia and Kabat) | LCDR3 |
| 1521 | VL |
| 1522 | DNA VL |
| 1523 | Linker |
| 1524 | scFv (VH-linker-VL) |
| 1525 | DNA scFv (VH-linker-VL) |
| 1526 | Full CAR amino acid sequence |
| 1527 | Full CAR nucleic acid sequence |
| CD20-C2H4 | |
| 1528 (Kabat) | HCDR1 |
| 1529 (Kabat) | HCDR2 |
| 1530 (Kabat) | HCDR3 |
| 1531 (Chothia) | HCDR1 |
| 1532 (Chothia) | HCDR2 |
| 1533 (Chothia) | HCDR3 |
| 1534 (IMGT) | HCDR1 |
| 1535 (IMGT) | HCDR2 |
| 1536 (IMGT) | HCDR3 |
| 1537 (Combined Chothia and Kabat) | HCDR1 |
| 1538 (Combined Chothia and Kabat) | HCDR2 |
| 1539 (Combined Chothia and Kabat) | HCDR3 |
| 1540 | VH |
| 1541 | DNA VH |
| 1542 (Kabat) | LCDR1 |
| 1543 (Kabat) | LCDR2 |
| 1544 (Kabat) | LCDR3 |
| 1545 (Chothia) | LCDR1 |
| 1546 (Chothia) | LCDR2 |
| 1547 (Chothia) | LCDR3 |
| 1548 (IMGT) | LCDR1 |
| 1549 (IMGT) | LCDR2 |
| 1550 (IMGT) | LCDR3 |
| 1551 (Combined Chothia and Kabat) | LCDR1 |
| 1552 (Combined Chothia and Kabat) | LCDR2 |
| 1553 (Combined Chothia and Kabat) | LCDR3 |
| 1554 | VL |
| 1555 | DNA VL |
| 1556 | Linker |
| 1557 | scFv (VH-linker-VL) |
| 1558 | DNA scFv (VH-linker-VL) |
| 1559 | Full CAR amino acid sequence |
| 1560 | Full CAR nucleic acid sequence |
| CD20-C3H1 | |
| 1561 (Kabat) | HCDR1 |
| 1562 (Kabat) | HCDR2 |
| 1563 (Kabat) | HCDR3 |
| 1564 (Chothia) | HCDR1 |
| 1565 (Chothia) | HCDR2 |
| 1566 (Chothia) | HCDR3 |
| 1567 (IMGT) | HCDR1 |
| 1568 (IMGT) | HCDR2 |
| 1569 (IMGT) | HCDR3 |
| 1570 (Combined Chothia and Kabat) | HCDR1 |
| 1571 (Combined Chothia and Kabat) | HCDR2 |
| 1572 (Combined Chothia and Kabat) | HCDR3 |
| 1573 | VH |
| 1574 | DNA VH |
| 1575 (Kabat) | LCDR1 |
| 1576 (Kabat) | LCDR2 |
| 1577 (Kabat) | LCDR3 |
| 1578 (Chothia) | LCDR1 |
| 1579 (Chothia) | LCDR2 |
| 1580 (Chothia) | LCDR3 |
| 1581 (IMGT) | LCDR1 |
| 1582 (IMGT) | LCDR2 |
| 1583 (IMGT) | LCDR3 |
| 1584 (Combined Chothia and Kabat) | LCDR1 |
| 1585 (Combined Chothia and Kabat) | LCDR2 |
| 1586 (Combined Chothia and Kabat) | LCDR3 |
| 1587 | VL |
| 1588 | DNA VL |
| 1589 | Linker |
| 1590 | scFv (VH-linker-VL) |
| 1591 | DNA scFv (VH-linker-VL) |
| 1592 | Full CAR amino acid sequence |
| 1593 | Full CAR nucleic acid sequence |
| CD20-C3H3 | |
| 1594 (Kabat) | HCDR1 |
| 1595 (Kabat) | HCDR2 |
| 1596 (Kabat) | HCDR3 |
| 1597 (Chothia) | HCDR1 |
| 1598 (Chothia) | HCDR2 |
| 1599 (Chothia) | HCDR3 |
| 1600 (IMGT) | HCDR1 |
| 1601 (IMGT) | HCDR2 |
| 1602 (IMGT) | HCDR3 |
| 1603 | VH |
| 1604 | DNA VH |
| 1605 (Kabat) | LCDR1 |
| 1606 (Kabat) | LCDR2 |
| 1607 (Kabat) | LCDR3 |
| 1608 (Chothia) | LCDR1 |
| 1609 (Chothia) | LCDR2 |
| 1610 (Chothia) | LCDR3 |
| 1611 (IMGT) | LCDR1 |
| 1612 (IMGT) | LCDR2 |
| 1613 (IMGT) | LCDR3 |
| 1614 (Combined Chothia and Kabat) | LCDR1 |
| 1615 (Combined Chothia and Kabat) | LCDR2 |
| 1616 (Combined Chothia and Kabat) | LCDR3 |
| 1617 | VL |
| 1618 | DNA VL |
| 1619 | Linker |
| 1620 | scFv (VH-linker-VL) |
| 1621 | DNA scFv (VH-linker-VL) |
| 1622 | Full CAR amino acid sequence |
| 1623 | Full CAR nucleic acid sequence |
| CD20-C3H4 | |
| 1624 (Kabat) | HCDR1 |
| 1625 (Kabat) | HCDR2 |
| 1626 (Kabat) | HCDR3 |
| 1627 (Chothia) | HCDR1 |
| 1628 (Chothia) | HCDR2 |
| 1629 (Chothia) | HCDR3 |
| 1630 (IMGT) | HCDR1 |
| 1631 (IMGT) | HCDR2 |
| 1632 (IMGT) | HCDR3 |
| 1633 (Combined Chothia and Kabat) | HCDR1 |
| 1634 (Combined Chothia and Kabat) | HCDR2 |
| 1635 (Combined Chothia and Kabat) | HCDR3 |
| 1636 | VH |
| 1637 | DNA VH |
| 1638 (Kabat) | LCDR1 |
| 1639 (Kabat) | LCDR2 |
| 1640 (Kabat) | LCDR3 |
| 1641 (Chothia) | LCDR1 |
| 1642 (Chothia) | LCDR2 |
| 1643 (Chothia) | LCDR3 |
| 1644 (IMGT) | LCDR1 |
| 1645 (IMGT) | LCDR2 |
| 1646 (IMGT) | LCDR3 |
| 1647 (Combined Chothia and Kabat) | LCDR1 |
| 1648 (Combined Chothia and Kabat) | LCDR2 |
| 1649 (Combined Chothia and Kabat) | LCDR3 |
| 1650 | VL |
| 1651 | DNA VL |
| 1652 | Linker |
| 1653 | scFv (VH-linker-VL) |
| 1654 | DNA scFv (VH-linker-VL) |
| 1655 | Full CAR amino acid sequence |
| 1656 | Full CAR nucleic acid sequence |
| CD20-C5H2 | |
| 1657 (Kabat) | HCDR1 |
| 1658 (Kabat) | HCDR2 |
| 1659 (Kabat) | HCDR3 |
| 1660 (Chothia) | HCDR1 |
| 1661 (Chothia) | HCDR2 |
| 1662 (Chothia) | HCDR3 |
| 1663 (IMGT) | HCDR1 |
| 1664 (IMGT) | HCDR2 |
| 1665 (IMGT) | HCDR3 |
| 1666 (Combined Chothia and Kabat) | HCDR1 |
| 1667 (Combined Chothia and Kabat) | HCDR2 |
| 1668 (Combined Chothia and Kabat) | HCDR3 |
| 1669 | VH |
| 1670 | DNA VH |
| 1671 (Kabat) | LCDR1 |
| 1672 (Kabat) | LCDR2 |
| 1673 (Kabat) | LCDR3 |
| 1674 (Chothia) | LCDR1 |
| 1675 (Chothia) | LCDR2 |
| 1676 (Chothia) | LCDR3 |
| 1677 (IMGT) | LCDR1 |
| 1678 (IMGT) | LCDR2 |
| 1679 (IMGT) | LCDR3 |
| 1680 (Combined Chothia and Kabat) | LCDR1 |
| 1681 (Combined Chothia and Kabat) | LCDR2 |
| 1682 (Combined Chothia and Kabat) | LCDR3 |
| 1683 | VL |
| 1684 | DNA VL |
| 1685 | Linker |
| 1686 | scFv (VH-linker-VL) |
| 1687 | DNA scFv (VH-linker-VL) |
| 1688 | Full CAR amino acid sequence |
| 1689 | Full CAR nucleic acid sequence |
| CD20-C5H3 | |
| 1690 (Kabat) | HCDR1 |
| 1691 (Kabat) | HCDR2 |
| 1692 (Kabat) | HCDR3 |
| 1693 (Chothia) | HCDR1 |
| 1694 (Chothia) | HCDR2 |
| 1695 (Chothia) | HCDR3 |
| 1696 (IMGT) | HCDR1 |
| 1697 (IMGT) | HCDR2 |
| 1698 (IMGT) | HCDR3 |
| 1699 (Combined Chothia and Kabat) | HCDR1 |
| 1700 (Combined Chothia and Kabat) | HCDR2 |
| 1701 (Combined Chothia and Kabat) | HCDR3 |
| 1702 | VH |
| 1703 | DNA VH |
| 1704 (Kabat) | LCDR1 |
| 1705 (Kabat) | LCDR2 |
| 1706 (Kabat) | LCDR3 |
| 1707 (Chothia) | LCDR1 |
| 1708 (Chothia) | LCDR2 |
| 1709 (Chothia) | LCDR3 |
| 1710 (IMGT) | LCDR1 |
| 1711 (IMGT) | LCDR2 |
| 1712 (IMGT) | LCDR3 |
| 1713 (Combined Chothia and Kabat) | LCDR1 |
| 1714 (Combined Chothia and Kabat) | LCDR2 |
| 1715 (Combined Chothia and Kabat) | LCDR3 |
| 1716 | VL |
| 1717 | DNA VL |
| 1718 | Linker |
| 1719 | scFv (VH-linker-VL) |
| 1720 | DNA scFv (VH-linker-VL) |
| 1721 | Full CAR amino acid sequence |
| 1722 | Full CAR nucleic acid sequence |
| CD20-C5H4 | |
| 1723 (Kabat) | HCDR1 |
| 1724 (Kabat) | HCDR2 |
| 1725 (Kabat) | HCDR3 |
| 1726 (Chothia) | HCDR1 |
| 1727 (Chothia) | HCDR2 |
| 1728 (Chothia) | HCDR3 |
| 1729 (IMGT) | HCDR1 |
| 1730 (IMGT) | HCDR2 |
| 1731 (IMGT) | HCDR3 |
| 1732 (Combined Chothia and Kabat) | HCDR1 |
| 1733 (Combined Chothia and Kabat) | HCDR2 |
| 1734 (Combined Chothia and Kabat) | HCDR3 |
| 1735 | VH |
| 1736 | DNA VH |
| 1737 (Kabat) | LCDR1 |
| 1738 (Kabat) | LCDR2 |
| 1739 (Kabat) | LCDR3 |
| 1740 (Chothia) | LCDR1 |
| 1741 (Chothia) | LCDR2 |
| 1742 (Chothia) | LCDR3 |
| 1743 (IMGT) | LCDR1 |
| 1744 (IMGT) | LCDR2 |
| 1745 (IMGT) | LCDR3 |
| 1746 (Combined Chothia and Kabat) | LCDR1 |
| 1747 (Combined Chothia and Kabat) | LCDR2 |
| 1748 (Combined Chothia and Kabat) | LCDR3 |
| 1749 | VL |
| 1750 | DNA VL |
| 1751 | Linker |
| 1752 | scFv (VH-linker-VL) |
| 1753 | DNA scFv (VH-linker-VL) |
| 1754 | Full CAR amino acid sequence |
| 1755 | Full CAR nucleic acid sequence |
| CD20-C8H1 | |
| 1756 (Kabat) | HCDR1 |
| 1757 (Kabat) | HCDR2 |
| 1758 (Kabat) | HCDR3 |
| 1759 (Chothia) | HCDR1 |
| 1760 (Chothia) | HCDR2 |
| 1761 (Chothia) | HCDR3 |
| 1762 (IMGT) | HCDR1 |
| 1763 (IMGT) | HCDR2 |
| 1764 (IMGT) | HCDR3 |
| 1765 (Combined Chothia and Kabat) | HCDR1 |
| 1766 (Combined Chothia and Kabat) | HCDR2 |
| 1767 (Combined Chothia and Kabat) | HCDR3 |
| 1768 | VH |
| 1769 | DNA VH |
| 1770 (Kabat) | LCDR1 |
| 1771 (Kabat) | LCDR2 |
| 1772 (Kabat) | LCDR3 |
| 1773 (Chothia) | LCDR1 |
| 1774 (Chothia) | LCDR2 |
| 1775 (Chothia) | LCDR3 |
| 1776 (IMGT) | LCDR1 |
| 1777 (IMGT) | LCDR2 |
| 1778 (IMGT) | LCDR3 |
| 1779 (Combined Chothia and Kabat) | LCDR1 |
| 1780 (Combined Chothia and Kabat) | LCDR2 |
| 1781 (Combined Chothia and Kabat) | LCDR3 |
| 1782 | VL |
| 1783 | DNA VL |
| 1784 | Linker |
| 1785 | scFv (VH-linker-VL) |
| 1786 | DNA scFv (VH-linker-VL) |
| 1787 | Full CAR amino acid sequence |
| 1788 | Full CAR nucleic acid sequence |
| CD20-C8H2 | |
| 1789 (Kabat) | HCDR1 |
| 1790 (Kabat) | HCDR2 |
| 1791 (Kabat) | HCDR3 |
| 1792 (Chothia) | HCDR1 |
| 1793 (Chothia) | HCDR2 |
| 1794 (Chothia) | HCDR3 |
| 1795 (IMGT) | HCDR1 |
| 1796 (IMGT) | HCDR2 |
| 1797 (IMGT) | HCDR3 |
| 1798 (Combined Chothia and Kabat) | HCDR1 |
| 1799 (Combined Chothia and Kabat) | HCDR2 |
| 1800 (Combined Chothia and Kabat) | HCDR3 |
| 1801 | VH |
| 1802 | DNA VH |
| 1803 (Kabat) | LCDR1 |
| 1804 (Kabat) | LCDR2 |
| 1805 (Kabat) | LCDR3 |
| 1806 (Chothia) | LCDR1 |
| 1807 (Chothia) | LCDR2 |
| 1808 (Chothia) | LCDR3 |
| 1809 (IMGT) | LCDR1 |
| 1810 (IMGT) | LCDR2 |
| 1811 (IMGT) | LCDR3 |
| 1812 (Combined Chothia and Kabat) | LCDR1 |
| 1813 (Combined Chothia and Kabat) | LCDR2 |
| 1814 (Combined Chothia and Kabat) | LCDR3 |
| 1815 | VL |
| 1816 | DNA VL |
| 1817 | Linker |
| 1818 | scFv (VH-linker-VL) |
| 1819 | DNA scFv (VH-linker-VL) |
| 1820 | Full CAR amino acid sequence |
| 1821 | Full CAR nucleic acid sequence |
| CD20-C8H3 | |
| 1822 (Kabat) | HCDR1 |
| 1823 (Kabat) | HCDR2 |
| 1824 (Kabat) | HCDR3 |
| 1825 (Chothia) | HCDR1 |
| 1826 (Chothia) | HCDR2 |
| 1827 (Chothia) | HCDR3 |
| 1828 (IMGT) | HCDR1 |
| 1829 (IMGT) | HCDR2 |
| 1830 (IMGT) | HCDR3 |
| 1831 (Combined Chothia and Kabat) | HCDR1 |
| 1832 (Combined Chothia and Kabat) | HCDR2 |
| 1833 (Combined Chothia and Kabat) | HCDR3 |
| 1834 | VH |
| 1835 | DNA VH |
| 1836 (Kabat) | LCDR1 |
| 1837 (Kabat) | LCDR2 |
| 1838 (Kabat) | LCDR3 |
| 1839 (Chothia) | LCDR1 |
| 1840 (Chothia) | LCDR2 |
| 1841 (Chothia) | LCDR3 |
| 1842 (IMGT) | LCDR1 |
| 1843 (IMGT) | LCDR2 |
| 1844 (IMGT) | LCDR3 |
| 1845 (Combined Chothia and Kabat) | LCDR1 |
| 1846 (Combined Chothia and Kabat) | LCDR2 |
| 1847 (Combined Chothia and Kabat) | LCDR3 |
| 1848 | VL |
| 1849 | DNA VL |
| 1850 | Linker |
| 1851 | scFv (VH-linker-VL) |
| 1852 | DNA scFv (VH-linker-VL) |
| 1853 | Full CAR amino acid sequence |
| 1854 | Full CAR nucleic acid sequence |
| CD20-C8H4 | |
| 1855 (Kabat) | HCDR1 |
| 1856 (Kabat) | HCDR2 |
| 1857 (Kabat) | HCDR3 |
| 1858 (Chothia) | HCDR1 |
| 1859 (Chothia) | HCDR2 |
| 1860 (Chothia) | HCDR3 |
| 1861 (IMGT) | HCDR1 |
| 1862 (IMGT) | HCDR2 |
| 1863 (IMGT) | HCDR3 |
| 1864 (Combined Chothia and Kabat) | HCDR1 |
| 1865 (Combined Chothia and Kabat) | HCDR2 |
| 1866 (Combined Chothia and Kabat) | HCDR3 |
| 1867 | VH |
| 1868 | DNA VH |
| 1869 (Kabat) | LCDR1 |
| 1870 (Kabat) | LCDR2 |
| 1871 (Kabat) | LCDR3 |
| 1872 (Chothia) | LCDR1 |
| 1873 (Chothia) | LCDR2 |
| 1874 (Chothia) | LCDR3 |
| 1875 (IMGT) | LCDR1 |
| 1876 (IMGT) | LCDR2 |
| 1877 (IMGT) | LCDR3 |
| 1878 (Combined Chothia and Kabat) | LCDR1 |
| 1879 (Combined Chothia and Kabat) | LCDR2 |
| 1880 (Combined Chothia and Kabat) | LCDR3 |
| 1881 | VL |
| 1882 | DNA VL |
| 1883 | Linker |
| 1884 | scFv (VH-linker-VL) |
| 1885 | DNA scFv (VH-linker-VL) |
| 1886 | Full CAR amino acid sequence |
| 1887 | Full CAR nucleic acid sequence |
| CD20-C2 | |
| 1888 | VH |
| 1889 | DNA VH |
| 1890 | VL |
| 1891 | DNA VL |
| CD20-C3 | |
| 1892 | VH |
| 1893 | DNA VH |
| 1894 | VL |
| 1895 | DNA VL |
| CD20-C5 | |
| 1896 | VH |
| 1897 | DNA VH |
| 1898 | VL |
| 1899 | DNA VL |
| CD20-C6 | |
| 1900 | VH |
| 1901 | DNA VH |
| 1902 | VL |
| 1903 | DNA VL |
| CD20-C7 | |
| 1904 | VH |
| 1905 | DNA VH |
| 1906 | VL |
| 1907 | DNA VL |
| CD20-C8 | |
| 1908 | VH |
| 1909 | DNA VH |
| 1910 | VL |
| 1911 | DNA VL |
| CD20-3m | |
| 1912 | VH |
| 1913 | DNA VH |
| 1914 | VL |
| 1915 | DNA VL |
| 1916 | Linker |
| 1917 | scFv (VH-linker-VL) |
| CD20-3J | |
| 1918 | VH |
| 1919 | DNA VH |
| 1920 | VL |
| 1921 | DNA VL |
| 1922 | Linker |
| 1923 | scFv (VH-linker-VL) |
| CD20-3H5k1 | |
| 1924 | VH |
| 1925 | DNA VH |
| 1926 | VL |
| 1927 | DNA VL |
| 1928 | Linker |
| 1929 | scFv (VH-linker-VL) |
| CD20-3H5k3 | |
| 1930 | VH |
| 1931 | DNA VH |
| 1932 | VL |
| 1933 | DNA VL |
| 1934 | Linker |
| 1935 | scFv (VH-linker-VL) |
| CD20-Ofa | |
| 1936 (Kabat) | HCDR1 |
| 1937 (Kabat) | HCDR2 |
| 1938 (Kabat) | HCDR3 |
| 1939 (Chothia) | HCDR1 |
| 1940 (Chothia) | HCDR2 |
| 1941 (Chothia) | HCDR3 |
| 1942 (IMGT) | HCDR1 |
| 1943 (IMGT) | HCDR2 |
| 1944 (IMGT) | HCDR3 |
| 1945 | VH |
| 1946 | DNA VH |
| 1947 (Kabat) | LCDR1 |
| 1948 (Kabat) | LCDR2 |
| 1949 (Kabat) | LCDR3 |
| 1950 (Chothia) | LCDR1 |
| 1951 (Chothia) | LCDR2 |
| 1952 (Chothia) | LCDR3 |
| 1953 (IMGT) | LCDR1 |
| 1954 (IMGT) | LCDR2 |
| 1955 (IMGT) | LCDR3 |
| 1956 | VL |
| 1957 | DNA VL |
| 1958 | Linker |
| 1959 | scFv (VH-linker-VL) |
| 1960 | DNA scFv (VH-linker-VL) |
| CD20-3 | |
| 1961 | VH |
| 1962 | VL |
| 1963 | Linker |
| 1964 | scFv (VH-linker-VL) |
| CD20-8aBBz | |
| 1965 | VH |
| 1966 | DNA VH |
| 1967 | VL |
| 1968 | DNA VL |
| 1969 | Linker |
| 1970 | scFv (VH-linker-VL) |
| 1971 | DNA scFv (VH-linker-VL) |

[0966] An overview of the sequences identifications of CDR (Kabat) sequences of the CD20 scFv domains of Table 11 are shown in Table 12 for the heavy chain variable domains and in Table 13 for the light chain variable domains. The SEQ ID NOs refer to those found in Table 11.

TABLE 12
Heavy Chain Variable Domain CDR (Kabat)
SEQ ID NO's of CD20 CAR molecules

| Candidate | HCDR1 | HCDR2 | HCDR3 |
|---|---|---|---|
| CD20-C3H2 | 1363 | 1364 | 1365 |
| CD20-C5H1 | 1396 | 1397 | 1398 |
| CD20-C2H1 | 1429 | 1430 | 1431 |
| CD20-C2H2 | 1462 | 1463 | 1464 |
| CD20-C2H3 | 1495 | 1496 | 1497 |
| CD20-C2H4 | 1528 | 1529 | 1530 |
| CD20-C3H1 | 1561 | 1562 | 1563 |
| CD20-C3H3 | 1594 | 1595 | 1596 |
| CD20-C3H4 | 1624 | 1625 | 1626 |
| CD20-C5H2 | 1657 | 1658 | 1659 |
| CD20-C5H3 | 1690 | 1691 | 1692 |
| CD20-C5H4 | 1723 | 1724 | 1725 |
| CD20-C8H1 | 1756 | 1757 | 1758 |
| CD20-C8H2 | 1789 | 1790 | 1791 |
| CD20-C8H3 | 1822 | 1823 | 1824 |
| CD20-C8H4 | 1855 | 1856 | 1857 |

TABLE 13
Light Chain Variable Domain CDR (Kabat)
SEQ ID NO's of CD20 Antibody Molecules

| Candidate | LCDR1 | LCDR2 | LCDR3 |
|---|---|---|---|
| CD20-C3H2 | 1377 | 1378 | 1379 |
| CD20-C5H1 | 1410 | 1411 | 1412 |
| CD20-C2H1 | 1443 | 1444 | 1445 |
| CD20-C2H2 | 1476 | 1477 | 1478 |
| CD20-C2H3 | 1509 | 1510 | 1511 |
| CD20-C2H4 | 1542 | 1543 | 1544 |
| CD20-C3H1 | 1575 | 1576 | 1577 |
| CD20-C3H3 | 1605 | 1606 | 1607 |
| CD20-C3H4 | 1638 | 1639 | 1640 |
| CD20-C5H2 | 1671 | 1672 | 1673 |
| CD20-C5H3 | 1704 | 1705 | 1706 |
| CD20-C5H4 | 1737 | 1738 | 1739 |
| CD20-C8H1 | 1770 | 1771 | 1772 |
| CD20-C8H2 | 1803 | 1804 | 1805 |
| CD20-C8H3 | 1836 | 1837 | 1838 |
| CD20-C8H4 | 1869 | 1870 | 1871 |

### Additional CD20 Inhibitors

[0967] In some embodiments, the BCMA CAR-expressing cell therapy is administered in combination with a CD20 inhibitor.

[0968] In one embodiment, the CD20 inhibitor is an anti-CD20 antibody or fragment thereof. In an embodiment, the antibody is a monospecific antibody and in another embodiment the antibody is a bispecific antibody. In an embodiment, the CD20 inhibitor is a chimeric mouse/human monoclonal antibody, e.g., rituximab. In an embodiment, the CD20 inhibitor is a human monoclonal antibody such as of atumumab. In an embodiment, the CD20 inhibitor is a humanized antibody such as ocrelizumab, veltuzumab, obinutuzumab, ocaratuzumab, or PRO131921 (Genentech). In an embodiment, the CD20 inhibitor is a fusion protein comprising a portion of an anti-CD20 antibody, such as TRU-015 (Trubion Pharmaceuticals).

### CD22 CAR

[0969] In some embodiments, the BCMA CAR-expressing cell therapy is administered in combination with a CD22 CAR-expressing cell therapy (e.g., cells expressing a CAR that binds to human CD22).

[0970] In some embodiments, the CD22 CAR-expressing cell therapy includes an antigen binding domain according to WO2016/164731, incorporated herein by reference.

[0971] The sequences of CD22 CAR are provided below. In some embodiments, the CD22 CAR is CD22-65. In some embodiments, the CD22 CAR is CD22-65s. In some embodiments, the CD22 CAR is CD22-65ss.

Human CD22 CAR CD22-65 scFv sequence
(SEQ ID NO: 1972)
EVQLQQSGPGLVKPSQTLSLTCAISGDSMLSNSDTWNWIRQSPSRGLEW
LGRTYHRSTWYDDYASSVRGRVSINVDTSKNQYSLQLNAVTPEDTGVYY
CARVRLQDGNSWSDAFDVWGQGTMVTVSSGGGGSGGGGSGGGGSQSALT
QPASASGSPGQSVTISCTGTSSDVGGYNYVSWYQQHPGKAPKLMIYDVS
NRPSGVSNRFSGSKSGNTASLTISGLQAEDEADYYCSSYTSSSTLYVFG
TGTQLTVL
Human CD22 CAR CD22-65s scFc sequence (linker
shown by italics and underline)
(SEQ ID NO: 2036)
EVQLQQSGPGLVKPSQTLSLTCAISGDSMLSNSDTWNWIRQSPSRGLEW
LGRTYHRSTWYDDYASSVRGRVSINVDTSKNQYSLQLNAVTPEDTGVYY
CARVRLQDGNSWSDAFDVWGQGTMVTVSSGGGGSQSALTQPASASGSPG
QSVTISCTGTSSDVGGYNYVSWYQQHPGKAPKLMIYDVSNRPSGVSNRF
SGSKSGNTASLTISGLQAEDEADYYCSSYTSSSTLYVFGTGTQLTVL
Human CD22 CAR CD22-65ss scFc sequence
(SEQ ID NO: 1973)
EVQLQQSGPGLVKPSQTLSLTCAISGDSMLSNSDTWNWIRQSPSRGLEW
LGRTYHRSTWYDDYASSVRGRVSINVDTSKNQYSLQLNAVTPEDTGVYY
CARVRLQDGNSWSDAFDVWGQGTMVTVSSQSALTQPASASGSPGQSVTI
SCTGTSSDVGGYNYVSWYQQHPGKAPKLMIYDVSNRPSGVSNRFSGSKS
GNTASLTISGLQAEDEADYYCSSYTSSSTLYVFGTGTQLTVL
Human CD22 CAR heavy chain variable region
(SEQ ID NO: 1974)
EVQLQQSGPGLVKPSQTLSLTCAISGDSMLSNSDTWNWIRQSPSRGLEW
LGRTYHRSTWYDDYASSVRGRVSINVDTSKNQYSLQLNAVTPEDTGVYY
CARVRLQDGNSWSDAFDVWGQGTMVTVSS
Human CD22 CAR light chain variable region
(SEQ ID NO: 1975)
QSALTQPASASGSPGQSVTISCTGTSSDVGGYNYVSWYQQHPGKAPKLM
IYDVSNRPSGVSNRFSGSKSGNTASLTISGLQAEDEADYYCSSYTSSST
LYVFGTGTQLTVL

TABLE 14
Heavy Chain Variable Domain CDRs of CD22 CAR (CD22-65)

| | | SEQ ID | | SEQ ID | | SEQ ID |
|---|---|---|---|---|---|---|
| Candidate | HCDR1 | NO: | HCDR2 | NO: | HCDR3 | NO: |
| CD22-65 | GDSML | 1976 | RTYHRSTWYDDYA | 1978 | VRLQDGNSWSD | 1980 |
| Combined | SNSDT | | SSVRG | | AFDV | |
| | WN | | | | | |
| CD22-65 | SNSDT | 1977 | RTYHRSTWYDDYA | 1979 | VRLQDGNSWSD | 1981 |
| Kabat | WN | | SSVRG | | AFDV | |

TABLE 15
Light Chain Variable Domain CDRs of CD22 CAR (CD22-65). The LC CDR sequences
in this table have the same sequence under the Kabat or combined definitions.

| | | SEQ ID | | SEQ ID | | SEQ ID |
|---|---|---|---|---|---|---|
| Candidate | LCDR1 | NO: | LCDR2 | NO: | LCDR3 | NO: |
| CD22-65 | TGTSSDVGGYNYVS | 1982 | DVSNRPS | 1983 | SSYTSSSTLYV | 1984 |
| Combined | | | | | | |

[0972] In some embodiments, the antigen binding domain comprises a HC CDR1, a HC CDR2, and a HC CDR3 of any heavy chain binding domain amino acid sequences listed in Table 14. In embodiments, the antigen binding domain further comprises a LC CDR1, a LC CDR2, and a LC CDR3. In embodiments, the antigen binding domain comprises a LC CDR1, a LC CDR2, and a LC CDR3 amino acid sequences listed in Table 15.

[0973] In some embodiments, the antigen binding domain comprises one, two or all of LC CDR1, LC CDR2, and LC CDR3 of any light chain binding domain amino acid sequences listed in Table 15, and one, two or all of HC CDR1, HC CDR2, and HC CDR3 of any heavy chain binding domain amino acid sequences listed in Table 14.

[0974] In some embodiments, the CDRs are defined according to the Kabat numbering scheme, the Chothia numbering scheme, or a combination thereof.

[0975] The order in which the VL and VH domains appear in the scFv can be varied (i.e., VL-VH, or VH-VL orientation), and where any of one, two, three or four copies of the “G4S” (SEQ ID NO: 1032) subunit, in which each subunit comprises the sequence GGGGS (SEQ ID NO: 1032) (e.g., (G4S)₃ (SEQ ID NO: 1040) or (G45)₄ (SEQ ID NO: 1039)), can connect the variable domains to create the entirety of the scFv domain. Alternatively, the CAR construct can include, for example, a linker including the sequence GSTSGSGKPGSGEGSTKG (SEQ ID NO: 1985). Alternatively, the CAR construct can include, for example, a linker including the sequence LAEAAAK (SEQ ID NO: 2033). In an embodiment, the CAR construct does not include a linker between the VL and VH domains.

[0976] These clones all contained a Q/K residue change in the signal domain of the co-stimulatory domain derived from CD3zeta chain.

### Additional CD22 Inhibitors

[0977] In some embodiments, the BCMA CAR-expressing cell therapy is administered in combination with a CD20 inhibitor. In some embodiments, the CD20 inhibitor is a small molecule or an anti-CD20 antibody molecule.

[0978] In an embodiment, the antibody is a monospecific antibody, optionally conjugated to a second agent such as a chemotherapeutic agent. For instance, in an embodiment the antibody is an anti-CD22 monoclonal antibody-MMAE conjugate (e.g., DCDT2980S). In an embodiment, the antibody is an scFv of an anti-CD22 antibody, e.g., an scFv of antibody RFB4. This scFv can be fused to all of or a fragment of Pseudomonas exotoxin-A (e.g., BL22). In an embodiment, the antibody is a humanized anti-CD22 monoclonal antibody (e.g., epratuzumab). In an embodiment, the antibody or fragment thereof comprises the Fv portion of an anti-CD22 antibody, which is optionally covalently fused to all or a fragment or (e.g., a 38 KDa fragment of) Pseudomonas exotoxin-A (e.g., moxetumomab pasudotox). In an embodiment, the anti-CD22 antibody is an anti-CD19/CD22 bispecific antibody, optionally conjugated to a toxin. For instance, in one embodiment, the anti-CD22 antibody comprises an anti-CD19/CD22 bispecific portion, (e.g., two scFv ligands, recognizing human CD19 and CD22) optionally linked to all of or a portion of diphtheria toxin (DT), e.g., first 389 amino acids of diphtheria toxin (DT), DT 390, e.g., a ligand-directed toxin such as DT2219ARL). In another embodiment, the bispecific portion (e.g., anti-CD19/anti-CD22) is linked to a toxin such as deglycosylated ricin A chain (e.g., Combotox).

[0979] In some embodiments, the CD22 inhibitor is a multispecific antibody molecule, e.g., a bispecific antibody molecule, e.g., a bispecific antibody molecule that binds to CD20 and CD3. Exemplary bispecific antibody molecules that bind to CD20 and CD3 are disclosed in WO2016086189 and WO2016182751, herein incorporated by reference in their entirety. In some embodiments, the bispecific antibody molecule that binds to CD20 and CD3 is XENP13676 as disclosed in FIG. 74, SEQ ID NOs: 323, 324, and 325 of WO2016086189.

### Multispecific CAR

[0980] In some embodiments, the CAR molecule disclosed herein is a multispecific, e.g., bispecific, CAR molecule comprising one, two, or more binding specificities, e.g., a first binding specificity for a first antigen, e.g., a B-cell epitope, and a second binding specificity for the same or a different antigen, e.g., B cell epitope.

[0981] In one embodiment, the first and second binding specificity is an antibody molecule, e.g., an antigen binding domain (e.g., a scFv). Within each antibody molecule (e.g., scFv) of a bispecific CAR molecule, the VH can be upstream or downstream of the VL. In some embodiments, the upstream antibody or antibody fragment (e.g., scFv) is arranged with its VH (VH₁) upstream of its VL (VL₁) and the downstream antibody or antibody fragment (e.g., scFv) is arranged with its VL (VL₂) upstream of its VH (VH₂), such that the overall bispecific CAR molecule has the arrangement VH₁-VL₁-VL₂-VH₂, from an N- to C-terminal orientation.

[0982] In some embodiments, the upstream antibody or antibody fragment or antigen binding domain (e.g., scFv) is arranged with its VL (VL₁) upstream of its VH (VH₁) and the downstream antibody or antibody fragment (e.g., scFv) is arranged with its VH (VH₂) upstream of its VL (VL₂), such that the overall bispecific CAR molecule has the arrangement VL₁-VH₁-VH₂-VL₂, from an N- to C-terminal orientation.

[0983] In some embodiments, the upstream antibody or antibody fragment (e.g., scFv) is arranged with its VL (VL₁) upstream of its VH (VH₁) and the downstream antibody or antibody fragment or antigen binding domain (e.g., scFv) is arranged with its VL (VL₂) upstream of its VH (VH₂), such that the overall bispecific CAR molecule has the arrangement VL₁-VH₁-VL₂-VH₂, from an N- to C-terminal orientation.

[0984] In some embodiments, the upstream antibody or antibody fragment or antigen binding domain (e.g., scFv) is arranged with its VH (VH₁) upstream of its VL (VL₁) and the downstream antibody or antibody fragment (e.g., scFv) is arranged with its VH (VH₂) upstream of its VL (VL₂), such that the overall bispecific CAR molecule has the arrangement VH₁-VL₁-VH₂-VL₂, from an N- to C-terminal orientation.

[0985] In any of the aforesaid configurations, optionally, a linker is disposed between the two antibodies or antibody fragments or antigen binding domains (e.g., scFvs), e.g., between VL₁ and VL₂ if the construct is arranged as VH₁-VL₁-VL₂-VH₂; between VH₁ and VH₂ if the construct is arranged as VL₁-VH₁-VH₂-VL₂; between VH₁ and VL₂ if the construct is arranged as VL₁-VH₁-VL₂-VH₂; or between VL₁ and VH₂ if the construct is arranged as VH₁-VL₁-VH₂-VL₂. In general, the linker between the two antibody fragments or antigen binding domains, e.g., scFvs, should be long enough to avoid mispairing between the domains of the two scFvs. The linker may be a linker as described herein. In some embodiments, the linker is a (Gly₄-Ser)ₙ linker (SEQ ID NO: 2034), wherein n is 1, 2, 3, 4, 5, or 6. In some embodiments, the linker is (Gly₄-Ser)ₙ, wherein n=1 (SEQ ID NO: 1032), e.g., the linker has the amino acid sequence Gly₄-Ser (SEQ ID NO: 1032). In some embodiments, the linker is (Gly₄-Ser)ₙ, wherein n=3 (SEQ ID NO: 1040). In some embodiments, the linker is (Gly₄-Ser)ₙ, wherein n=4 (SEQ ID NO: 1039). In some embodiments, the linker comprises, e.g., consists of, the amino acid sequence: LAEAAAK (SEQ ID NO: 2033).

[0986] In any of the aforesaid configurations, optionally, a linker is disposed between the VL and VH of the first antigen binding domains, e.g., scFv. Optionally, a linker is disposed between the VL and VH of the second antigen binding domains, e.g., scFv. In constructs that have multiple linkers, any two or more of the linkers can be the same or different. Accordingly, in some embodiments, a bispecific CAR comprises VLs, VHs, and optionally one or more linkers in an arrangement as described herein.

[0987] In some embodiments, each antibody molecule, e.g., each antigen binding domain (e.g., each scFv) comprises a linker between the VH and the VL regions. In some embodiments, the linker between the VH and the VL regions is a (Gly₄-Ser)ₙ linker (SEQ ID NO: 2034), wherein n is 1, 2, 3, 4, 5, or 6. In some embodiments, the linker is (Gly₄-Ser)ₙ, wherein n=1 (SEQ ID NO: 1032), e.g., the linker has the amino acid sequence Gly₄-Ser (SEQ ID NO: 1032). In other embodiments, the linker is (Gly₄-Ser)ₙ, wherein n=3 (SEQ ID NO: 1040). In some embodiments, the linker is (Gly₄-Ser)ₙ, wherein n=4 (SEQ ID NO: 1039). In some embodiments, the VH and VL regions are connected without a linker.

[0988] In certain embodiments, the CAR molecule is a bispecific CAR molecule having a first binding specificity for a first B-cell epitope and a second binding specificity for the same or a different B-cell antigen. For instance, in some embodiments the bispecific CAR molecule has a first binding specificity for BCMA and a second binding specificity for one or more of BCMA, CD10, CD19, CD20, CD22, CD34, CD123, FLT-3, ROR1, CD79b, CD179b, or CD79a. In some embodiments the bispecific CAR molecule has a first binding specificity for BCMA and a second binding specificity for CD19. In some embodiments the bispecific CAR molecule has a first binding specificity for BCMA and a second binding specificity for CD20. In some embodiments the bispecific CAR molecule has a first binding specificity for BCMA and a second binding specificity for CD22.

[0989] In one embodiment, the CAR molecule is a bispecific CAR molecule having a binding specificity, e.g., a first and/or second binding specificity, to BCMA, CD19, CD20, and/or CD22. In one embodiment, the binding specificity is configured with its VL (VL₁) upstream of its VH (VH₁) and the downstream antibody or antibody fragment or antigen binding domains (e.g., scFv) is arranged with its VL (VL₂) upstream of its VH (VH₂), such that the overall bispecific CAR molecule has the arrangement VL₁-VH₁-VL₂-VH₂, from an N- to C-terminal orientation. In some embodiments, the first and/or second binding specificity, to BCMA, CD19, CD20, and/or CD22 (e.g., first and/or second scFv to BCMA, CD19, CD20, and/or CD22) comprises a linker between the VH and the VL regions. In some embodiments, the linker between the VH and the VL regions is a (Gly₄-Ser)ₙ linker (SEQ ID NO: 2034), wherein n is 1, 2, 3, 4, 5, or 6. In some embodiments, the linker is (Gly₄-Ser)ₙ, wherein n=1 (SEQ ID NO: 1032), e.g., the linker has the amino acid sequence Gly₄-Ser (SEQ ID NO: 1032). In some embodiments, the linker is (Gly₄-Ser)ₙ, wherein n=3 (SEQ ID NO: 1040). In some embodiments, the linker is (Gly₄-Ser)ₙ, wherein n=4 (SEQ ID NO: 1039). In some embodiments, the VH and VL regions are connected without a linker.

[0990] In another embodiment, the binding specificity, e.g., a first and/or second binding specificity, to BCMA, CD19, CD20, and/or CD22 is configured with its VL (VL₁) upstream of its VH (VH₁) and the downstream antibody or antibody fragment or antigen binding domains (e.g., scFv) is arranged with its VH (VH₂) upstream of its VL (VL₂), such that the overall bispecific CAR molecule has the arrangement VL₁-VH₁-VH₂-VL₂, from an N- to C-terminal orientation. In some embodiments, the first and/or second binding specificity, to BCMA, CD19, CD20, and/or CD22 (e.g., first and/or second scFv to BCMA, CD19, CD20, and/or CD22) comprises a linker between the VH and the VL regions. In some embodiments, the linker between the VH and the VL regions is a (Gly₄-Ser)ₙ linker (SEQ ID NO: 2034), wherein n is 1, 2, 3, 4, 5, or 6. In some embodiments, the linker is (Gly₄-Ser)ₙ, wherein n=1 (SEQ ID NO: 1032), e.g., the linker has the amino acid sequence Gly₄-Ser (SEQ ID NO: 1032). In some embodiments, the linker is (Gly₄-Ser)ₙ, wherein n=3 (SEQ ID NO: 1040). In some embodiments, the linker is (Gly₄-Ser)ₙ, wherein n=4 (SEQ ID NO: 1039). In some embodiments, the VH and VL regions are connected without a linker.

[0991] In another embodiment, the binding specificity, e.g., a first and/or second binding specificity, to BCMA, CD19, CD20, and/or CD22 is configured with its VH (VH₁) upstream of its VL (VL₁) and the downstream antibody or antibody fragment or antigen binding domain (e.g., scFv) is arranged with its VL (VL₂) upstream of its VH (VH₂), such that the overall bispecific CAR molecule has the arrangement VH₁-VL₁-VL₂-VH₂, from an N- to C-terminal orientation. In some embodiments, the first and/or second binding specificity, to BCMA, CD19, CD20, and/or CD22 (e.g., first and/or second scFv to BCMA, CD19, CD20, and/or CD22) comprises a linker between the VH and the VL regions. In some embodiments, the linker between the VH and the VL regions is a (Gly₄-Ser)ₙ linker (SEQ ID NO: 2034), wherein n is 1, 2, 3, 4, 5, or 6. In some embodiments, the linker is (Gly₄-Ser)ₙ, wherein n=1 (SEQ ID NO: 1032), e.g., the linker has the amino acid sequence Gly₄-Ser (SEQ ID NO: 1032). In some embodiments, the linker is (Gly₄-Ser)ₙ, wherein n=3 (SEQ ID NO: 1040). In some embodiments, the linker is (Gly₄-Ser)ₙ, wherein n=4 (SEQ ID NO: 1039). In some embodiments, the VH and VL regions are connected without a linker.

[0992] In another embodiment, the binding specificity, e.g., a first and/or second binding specificity, to BCMA, CD19, CD20, and/or CD22 is configured with its VH (VH₁) upstream of its VL (VL₁) and the downstream antibody or antibody fragment or antigen binding domain (e.g., scFv) is arranged with its VH (VH₂) upstream of its VL (VL₂), such that the overall bispecific CAR molecule has the arrangement VH₁-VL₁-VH₂-VL₂, from an N- to C-terminal orientation. In some embodiments, the first and/or second binding specificity, to BCMA, CD19, CD20, and/or CD22 (e.g., first and/or second scFv to BCMA, CD19, CD20, and/or CD22) comprises a linker between the VH and the VL regions. In some embodiments, the linker between the VH and the VL regions is a (Gly₄-Ser)ₙ linker (SEQ ID NO: 2034), wherein n is 1, 2, 3, 4, 5, or 6. In some embodiments, the linker is (Gly₄-Ser)ₙ, wherein n=1 (SEQ ID NO: 1032), e.g., the linker has the amino acid sequence Gly₄-Ser (SEQ ID NO: 1032). In some embodiments, the linker is (Gly₄-Ser)ₙ, wherein n=3 (SEQ ID NO: 1040). In some embodiments, the linker is (Gly₄-Ser)ₙ, wherein n=4 (SEQ ID NO: 1039). In some embodiments, the VH and VL regions are connected without a linker.

[0993] In some embodiments, the bispecific CAR molecule comprises a first binding specificity to BCMA, e.g., any of the binding specificities to BCMA described herein, and a second binding specificity to CD19, e.g., any of the binding specificities to CD19 as described herein. In some embodiments, the bispecific CAR molecule comprises a first binding specificity to BCMA, e.g., any of the binding specificities to BCMA described herein, and a second binding specificity to CD20, e.g., any of the binding specificities to CD20 as described herein. In some embodiments, the bispecific CAR molecule comprises a first binding specificity to BCMA, e.g., any of the binding specificities to BCMA described herein, and a second binding specificity to CD22, e.g., any of the binding specificities to CD22 as described herein. In one embodiment, the first and second binding specificity are in a contiguous polypeptide chain, e.g., a single chain. In some embodiments, the first and second binding specificities, optionally, comprise a linker as described herein. In some embodiments, the linker is a (Gly₄-Ser)ₙ linker (SEQ ID NO: 2034), wherein n is 1, 2, 3, 4, 5, or 6. In some embodiments, the linker is (Gly₄-Ser)ₙ, wherein n=1 (SEQ ID NO: 1032), e.g., the linker has the amino acid sequence Gly₄-Ser (SEQ ID NO: 1032). In some embodiments, the linker is (Gly₄-Ser)ₙ, wherein n=3 (SEQ ID NO: 1040). In some embodiments, the linker is (Gly₄-Ser)ₙ, wherein n=4 (SEQ ID NO: 1039). In some embodiments, the linker comprises, e.g., consists of, the amino acid sequence: LAEAAAK (SEQ ID NO: 2033).

[0994] In some embodiments, the CAR molecule disclosed herein comprises a bispecific CAR comprising a first and second binding specificities, e.g., as described herein (e.g., two antibody molecules, e.g., two scFvs as described herein). In some embodiments, the bispecific CAR comprises two antibody molecules, wherein the first binding specificity, e.g., the first antibody molecule (e.g., the first antigen binding domain, e.g., the first scFv) is closer to the transmembrane domain, also referred to herein as the proximal antibody molecule (e.g., proximal antigen binding domain) and the second binding specificity, e.g., the second antibody molecule (e.g., second antigen binding domain, e.g., the second scFv) is further away from the membrane, also referred to herein as the distal antibody molecule (e.g., the distal antigen binding domain). Thus, from N-to-C-terminus, the CAR molecule comprises a distal binding specificity, e.g., a distal antibody molecule (e.g., a distal antigen binding domain, e.g., a distal scFV or scFv2), optionally, a linker, followed by a proximal binding specificity, e.g., a proximal antibody molecule (e.g., a proximal antigen binding domain, e.g., a proximal scFv or scFv1), optionally via a linker, to a transmembrane domain and an intracellular domain, e.g., as described herein. In some embodiments, the CAR molecule comprises a proximal or distal binding specificity for BCMA, e.g., a BCMA binding specificity as described herein. In one embodiment, the CAR molecule comprises a proximal binding specificity for BCMA, e.g., a BCMA binding specificity as described herein, and a distal binding specificity for CD19, e.g., a CD19 binding specificity as described herein. In one embodiment, the CAR molecule comprises a proximal binding specificity for BCMA, e.g., a BCMA binding specificity as described herein, and a distal binding specificity for CD20, e.g., a CD20 binding specificity as described herein. In one embodiment, the CAR molecule comprises a proximal binding specificity for BCMA, e.g., a BCMA binding specificity as described herein, and a distal binding specificity for CD22, e.g., a CD22 binding specificity as described herein. In one embodiment, the CAR molecule comprises a distal binding specificity for BCMA, e.g., a BCMA binding specificity as described herein, and a proximal binding specificity for CD19, e.g., a CD19 binding specificity as described herein. In one embodiment, the CAR molecule comprises a distal binding specificity for BCMA, e.g., a BCMA binding specificity as described herein, and a proximal binding specificity for CD20, e.g., a CD20 binding specificity as described herein. In one embodiment, the CAR molecule comprises a distal binding specificity for BCMA, e.g., a BCMA binding specificity as described herein, and a proximal binding specificity for CD22, e.g., a CD22 binding specificity as described herein.

[0995] In one embodiment, the CAR molecule comprises a distal to the membrane binding specificity to BCMA, e.g., a VL1-VH1 binding specificity to BCMA, and a proximal to the membrane binding specificity to CD19, CD20, or CD22, e.g., a VL2-VH2 or VH2-VL1 binding specificity to CD19. In one embodiment, the first and second binding specificity are in a contiguous polypeptide chain, e.g., a single chain. In some embodiments, the first and second binding specificities, optionally, comprise a linker as described herein. In some embodiments, the linker is a (Gly₄-Ser)ₙ linker (SEQ ID NO: 2034), wherein n is 1, 2, 3, 4, 5, or 6. In some embodiments, the linker is (Gly₄-Ser)ₙ, wherein n=1 (SEQ ID NO: 1032), e.g., the linker has the amino acid sequence Gly₄-Ser (SEQ ID NO: 1032). In some embodiments, the linker is (Gly₄-Ser)ₙ, wherein n=3 (SEQ ID NO: 1040). In some embodiments, the linker is (Gly₄-Ser)ₙ, wherein n=4 (SEQ ID NO: 1039). In some embodiments, the linker comprises, e.g., consists of, the amino acid sequence: LAEAAAK (SEQ ID NO: 2033).

[0996] In one embodiment, the CAR molecule comprises a proximal to the membrane binding specificity to BCMA, e.g., a VL1-VH1 binding specificity to BCMA, and a distal to the membrane binding specificity to CD19, CD20, or CD22, e.g., a VL2-VH2 or VH2-VL1 binding specificity to CD19, CD20, or CD22. In one embodiment, the first and second binding specificity are in a contiguous polypeptide chain, e.g., a single chain. In some embodiments, the first and second binding specificities, optionally, comprise a linker as described herein. In some embodiments, the linker is a (Gly₄-Ser)ₙ linker (SEQ ID NO: 2034), wherein n is 1, 2, 3, 4, 5, or 6. In some embodiments, the linker is (Gly₄-Ser)ₙ, wherein n=1 (SEQ ID NO: 1032), e.g., the linker has the amino acid sequence Gly₄-Ser (SEQ ID NO: 1032). In some embodiments, the linker is (Gly₄-Ser)ₙ, wherein n=3 (SEQ ID NO: 1040). In some embodiments, the linker is (Gly₄-Ser)ₙ, wherein n=4 (SEQ ID NO: 1039). In some embodiments, the linker comprises, e.g., consists of, the amino acid sequence: LAEAAAK (SEQ ID NO: 2033).

### FCRL2 or FCRL5 Inhibitor

[0997] In some embodiments, the BCMA CAR-expressing cell therapy is administered in combination with a FCRL2 or FCRL5 inhibitor. In some embodiments, the FCRL2 or FCRL5 inhibitor is an anti-FCRL2 antibody molecule, e.g., a bispecific antibody molecule, e.g., a bispecific antibody that binds to FCRL2 and CD3. In some embodiments, the FCRL2 or FCRL5 inhibitor is an anti-FCRL5 antibody molecule, e.g., a bispecific antibody molecule, e.g., a bispecific antibody that binds to FCRL5 and CD3. In some embodiments, the FCRL2 or FCRL5 inhibitor is a FCRL2 CAR-expressing cell therapy. In some embodiments, the FCRL2 or FCRL5 inhibitor is a FCRL5 CAR-expressing cell therapy.

[0998] Exemplary anti-FCRL5 antibody molecules are disclosed in US20150098900, US20160368985, WO2017096120 (e.g., antibodies ET200-001, ET200-002, ET200-003, ET200-006, ET200-007, ET200-008, ET200-009, ET200-010, ET200-011, ET200-012, ET200-013, ET200-014, ET200-015, ET200-016, ET200-017, ET200-018, ET200-019, ET200-020, ET200-021, ET200-022, ET200-023, ET200-024, ET200-025, ET200-026, ET200-027, ET200-028, ET200-029, ET200-030, ET200-031, ET200-032, ET200-033, ET200-034, ET200-035, ET200-037, ET200-038, ET200-039, ET200-040, ET200-041, ET200-042, ET200-043, ET200-044, ET200-045, ET200-069, ET200-078, ET200-079, ET200-081, ET200-097, ET200-098, ET200-099, ET200-100, ET200-101, ET200-102, ET200-103, ET200-104, ET200-105, ET200-106, ET200-107, ET200-108, ET200-109, ET200-110, ET200-111, ET200-112, ET200-113, ET200-114, ET200-115, ET200-116, ET200-117, ET200-118, ET200-119, ET200-120, ET200-121, ET200-122, ET200-123, ET200-125, ET200-005 and ET200-124 disclosed in WO2017096120), herein incorporated by reference in their entirety.

[0999] Exemplary FCRL5 CAR molecules are disclosed in WO2016090337, herein incorporated by reference in its entirety.

IL-15 and/or IL-15Ra

[1000] In some embodiments, the BCMA CAR-expressing cell therapy is administered in combination with IL-15. In some embodiments, the BCMA CAR-expressing cell therapy is administered in combination with an IL15/IL-15Ra complex. In some embodiments, the IL-15/IL-15Ra complex is chosen from NIZ985 (Novartis), ATL-803 (Altor) or CYP0150 (Cytune).

### Exemplary IL-15/IL-15Ra Complexes

[1001] In one embodiment, the IL-15/IL-15Ra complex comprises human IL-15 complexed with a soluble form of human IL-15Ra. The complex may comprise IL-15 covalently or noncovalently bound to a soluble form of IL-15Ra. In a particular embodiment, the human IL-15 is noncovalently bonded to a soluble form of IL-15Ra. In a particular embodiment, the human IL-15 of the composition comprises an amino acid sequence of SEQ ID NO: 1001 in Table 16 and the soluble form of human IL-15Ra comprises an amino acid sequence of SEQ ID NO:1002 in Table 16, as described in WO 2014/066527, incorporated by reference in its entirety. The molecules described herein can be made by vectors, host cells, and methods described in WO 2007/084342, incorporated by reference in its entirety.

TABLE 16
Amino acid and nucleotide sequences of exemplary IL-15/IL-15Ra
complexes
NIZ985

| | | |
|---|---|---|
| SEQ ID NO: | Human IL-15 | NWVNVISDLKKIEDLIQSMHIDATLYTESDVHPSCKVTAM |
| 1001 | | KCFLLELQVISLESGDASIHDTVENLIILANNSLSSNGNVTE |
| | | SGCKECEELEEKNIKEFLQSFVHIVQMFINTS |
| SEQ ID NO: | Human | ITCPPPMSVEHADIWVKSYSLYSRERYICNSGFKRKAGTSS |
| 1002 | Soluble IL- | LTECVLNKATNVAHWTTPSLKCIRDPALVHQRPAPPSTVT |
| | 15Ra | TAGVTPQPESLSPSGKEPAASSPSSNNTAATTAAIVPGSQL |
| | | MPSKSPSTGTTEISSHESSHGTPSQTTAKNWELTASASHQP |
| | | PGVYPQG |

### Other Exemplary IL-15/IL-15Ra Complexes

[1002] In one embodiment, the IL-15/IL-15Ra complex is ALT-803, an IL-15/IL-15Ra Fc fusion protein (IL-15N72D:IL-15RaSu/Fc soluble complex). ALT-803 is disclosed in WO 2008/143794, incorporated by reference in its entirety. In one embodiment, the IL-15/IL-15Ra Fc fusion protein comprises the sequences as disclosed in Table 17.

[1003] In one embodiment, the IL-15/IL-15Ra complex comprises IL-15 fused to the sushi domain of IL-15Ra (CYP0150, Cytune). The sushi domain of IL-15Ra refers to a domain beginning at the first cysteine residue after the signal peptide of IL-15Ra, and ending at the fourth cysteine residue after said signal peptide. The complex of IL-15 fused to the sushi domain of IL-15Ra is disclosed in WO 2007/04606 and WO 2012/175222, incorporated by reference in their entirety. In one embodiment, the IL-15/IL-15Ra sushi domain fusion comprises the sequences as disclosed in Table 17.

TABLE 17
Amino acid sequences of other exemplary IL-15/IL-15Ra complexes
ALT-803 (Altor)

| | | |
|---|---|---|
| SEQ ID NO: | IL-15N72D | NWVNVISDLKKIEDLIQSMHIDATLYTESDVHPSCKVTAMK |
| 1003 | | CFLLELQVISLESGDASIHDTVENLIILANDSLSSNGNVTESG |
| | | CKECEELEEKNIKEFLQSFVHIVQMFINTS |
| SEQ ID NO: | IL-15RaSu/Fc | ITCPPPMSVEHADIWVKSYSLYSRERYICNSGFKRKAGTSSL |
| 1004 | | TECVLNKATNVAHWTTPSLKCIREPKSCDKTHTCPPCPAPE |
| | | LLGGPSVFLFPPKPKDTLMISRTPEVTCVVVDVSHEDPEVKF |
| | | NWYVDGVEVHNAKTKPREEQYNSTYRVVSVLTVLHQDW |
| | | LNGKEYKCKVSNKALPAPIEKTISKAKGQPREPQVYTLPPS |
| | | RDELTKNQVSLTCLVKGFYPSDIAVEWESNGQPENNYKTTP |
| | | PVLDSDGSFFLYSKLTVDKSRWQQGNVFSCSVMHEALHNH |
| | | YTQKSLSLSPGK |

IL-15/IL-15Ra sushi domain fusion (Cytune)

| | | |
|---|---|---|
| SEQ ID | Human IL-15 | NWVNVISDLKKIEDLIQSMHIDATLYTESDVHPSCKVTAMK |
| NO: 1005 | | CFLLELQVISLESGDASIHDTVENLIILANNSLSSNGNVTESG |
| | | CKECEELEXKNIKEFLQSFVHIVQMFINTS |
| | | Where X is E or K |
| SEQ ID | Human IL- | ITCPPPMSVEHADIWVKSYSLYSRERYICNSGFKRKAGTSSL |
| NO: 1006 | 15Ra sushi | TECVLNKATNVAHWTTPSLKCIRDPALVHQRPAPP |
| | and hinge | |
| | domains | |

### PD-1 Inhibitor

[1004] In some embodiments, the BCMA CAR-expressing cell therapy is administered in combination with a PD-1 inhibitor. In some embodiments, the PD-1 inhibitor is chosen from PDR001 (Novartis), Nivolumab (Bristol-Myers Squibb), Pembrolizumab (Merck & Co), Pidilizumab (CureTech), MEDI0680 (Medimmune), REGN2810 (Regeneron), TSR-042 (Tesaro), PF-06801591 (Pfizer), BGB-A317 (Beigene), BGB-108 (Beigene), INCSHR1210 (Incyte), or AMP-224 (Amplimmune).

### Exemplary PD-1 Inhibitors

[1005] In one embodiment, the PD-1 inhibitor is an anti-PD-1 antibody molecule. In one embodiment, the PD-1 inhibitor is an anti-PD-1 antibody molecule as described in US 2015/0210769, published on Jul. 30, 2015, entitled “Antibody Molecules to PD-1 and Uses Thereof,” incorporated by reference in its entirety.

[1006] In one embodiment, the anti-PD-1 antibody molecule comprises at least one, two, three, four, five or six complementarity determining regions (CDRs) (or collectively all of the CDRs) from a heavy and light chain variable region comprising an amino acid sequence shown in Table 18 (e.g., from the heavy and light chain variable region sequences of BAP049-Clone-E or BAP049-Clone-B disclosed in Table 18), or encoded by a nucleotide sequence shown in Table 18. In some embodiments, the CDRs are according to the Kabat definition (e.g., as set out in Table 18). In some embodiments, the CDRs are according to the Chothia definition (e.g., as set out in Table 18). In some embodiments, the CDRs are according to the combined CDR definitions of both Kabat and Chothia (e.g., as set out in Table 18). In one embodiment, the combination of Kabat and Chothia CDR of VH CDR1 comprises the amino acid sequence GYTFTTYWMH (SEQ ID NO: 541). In one embodiment, one or more of the CDRs (or collectively all of the CDRs) have one, two, three, four, five, six or more changes, e.g., amino acid substitutions (e.g., conservative amino acid substitutions) or deletions, relative to an amino acid sequence shown in Table 18, or encoded by a nucleotide sequence shown in Table 18.

[1007] In one embodiment, the anti-PD-1 antibody molecule comprises a heavy chain variable region (VH) comprising a VHCDR1 amino acid sequence of SEQ ID NO: 501, a VHCDR2 amino acid sequence of SEQ ID NO: 502, and a VHCDR3 amino acid sequence of SEQ ID NO: 503; and a light chain variable region (VL) comprising a VLCDR1 amino acid sequence of SEQ ID NO: 510, a VLCDR2 amino acid sequence of SEQ ID NO: 511, and a VLCDR3 amino acid sequence of SEQ ID NO: 512, each disclosed in Table 18.

[1008] In one embodiment, the antibody molecule comprises a VH comprising a VHCDR1 encoded by the nucleotide sequence of SEQ ID NO: 524, a VHCDR2 encoded by the nucleotide sequence of SEQ ID NO: 525, and a VHCDR3 encoded by the nucleotide sequence of SEQ ID NO: 526; and a VL comprising a VLCDR1 encoded by the nucleotide sequence of SEQ ID NO: 529, a VLCDR2 encoded by the nucleotide sequence of SEQ ID NO: 530, and a VLCDR3 encoded by the nucleotide sequence of SEQ ID NO: 531, each disclosed in Table 18.

[1009] In one embodiment, the anti-PD-1 antibody molecule comprises a VH comprising the amino acid sequence of SEQ ID NO: 506, or an amino acid sequence at least 85%, 90%, 95%, or 99% identical or higher to SEQ ID NO: 506. In one embodiment, the anti-PD-1 antibody molecule comprises a VL comprising the amino acid sequence of SEQ ID NO: 520, or an amino acid sequence at least 85%, 90%, 95%, or 99% identical or higher to SEQ ID NO: 520. In one embodiment, the anti-PD-1 antibody molecule comprises a VL comprising the amino acid sequence of SEQ ID NO: 516, or an amino acid sequence at least 85%, 90%, 95%, or 99% identical or higher to SEQ ID NO: 516. In one embodiment, the anti-PD-1 antibody molecule comprises a VH comprising the amino acid sequence of SEQ ID NO: 506 and a VL comprising the amino acid sequence of SEQ ID NO: 520. In one embodiment, the anti-PD-1 antibody molecule comprises a VH comprising the amino acid sequence of SEQ ID NO: 506 and a VL comprising the amino acid sequence of SEQ ID NO: 516.

[1010] In one embodiment, the antibody molecule comprises a VH encoded by the nucleotide sequence of SEQ ID NO: 507, or a nucleotide sequence at least 85%, 90%, 95%, or 99% identical or higher to SEQ ID NO: 507. In one embodiment, the antibody molecule comprises a VL encoded by the nucleotide sequence of SEQ ID NO: 521 or 517, or a nucleotide sequence at least 85%, 90%, 95%, or 99% identical or higher to SEQ ID NO: 521 or 517. In one embodiment, the antibody molecule comprises a VH encoded by the nucleotide sequence of SEQ ID NO: 507 and a VL encoded by the nucleotide sequence of SEQ ID NO: 521 or 517.

[1011] In one embodiment, the anti-PD-1 antibody molecule comprises a heavy chain comprising the amino acid sequence of SEQ ID NO: 508, or an amino acid sequence at least 85%, 90%, 95%, or 99% identical or higher to SEQ ID NO: 508. In one embodiment, the anti-PD-1 antibody molecule comprises a light chain comprising the amino acid sequence of SEQ ID NO: 522, or an amino acid sequence at least 85%, 90%, 95%, or 99% identical or higher to SEQ ID NO: 522. In one embodiment, the anti-PD-1 antibody molecule comprises a light chain comprising the amino acid sequence of SEQ ID NO: 518, or an amino acid sequence at least 85%, 90%, 95%, or 99% identical or higher to SEQ ID NO: 518. In one embodiment, the anti-PD-1 antibody molecule comprises a heavy chain comprising the amino acid sequence of SEQ ID NO: 508 and a light chain comprising the amino acid sequence of SEQ ID NO: 522. In one embodiment, the anti-PD-1 antibody molecule comprises a heavy chain comprising the amino acid sequence of SEQ ID NO: 508 and a light chain comprising the amino acid sequence of SEQ ID NO: 518.

[1012] In one embodiment, the antibody molecule comprises a heavy chain encoded by the nucleotide sequence of SEQ ID NO: 509, or a nucleotide sequence at least 85%, 90%, 95%, or 99% identical or higher to SEQ ID NO: 509. In one embodiment, the antibody molecule comprises a light chain encoded by the nucleotide sequence of SEQ ID NO: 523 or 519, or a nucleotide sequence at least 85%, 90%, 95%, or 99% identical or higher to SEQ ID NO: 523 or 519. In one embodiment, the antibody molecule comprises a heavy chain encoded by the nucleotide sequence of SEQ ID NO: 509 and a light chain encoded by the nucleotide sequence of SEQ ID NO: 523 or 519.

[1013] The antibody molecules described herein can be made by vectors, host cells, and methods described in US 2015/0210769, incorporated by reference in its entirety.

TABLE 18
Amino acid and nucleotide sequences of
exemplary anti-PD-1 antibody molecules

| | |
|---|---|
| BAP049-Clone-B HC | |
| SEQ ID NO: 501 (Kabat) | HCDR1 |
| SEQ ID NO: 502 (Kabat) | HCDR2 |
| SEQ ID NO: 503 (Kabat) | HCDR3 |
| SEQ ID NO: 504 (Chothia) | HCDR1 |
| SEQ ID NO: 505 (Chothia) | HCDR2 |
| SEQ ID NO: 503 (Chothia) | HCDR3 |
| SEQ ID NO: 506 | VH |
| SEQ ID NO: 507 | DNA VH |
| SEQ ID NO: 508 | Heavy chain |
| SEQ ID NO: 509 | DNA heavy chain |
| BAP049-Clone-B LC | |
| SEQ ID NO: 510 (Kabat) | LCDR1 |
| SEQ ID NO: 511 (Kabat) | LCDR2 |
| SEQ ID NO: 512 (Kabat) | LCDR3 |
| SEQ ID NO: 513 (Chothia) | LCDR1 |
| SEQ ID NO: 514 (Chothia) | LCDR2 |
| SEQ ID NO: 515 (Chothia) | LCDR3 |
| SEQ ID NO: 516 | VL |
| SEQ ID NO: 517 | DNA VL |
| SEQ ID NO: 518 | Light chain |
| SEQ ID NO: 519 | DNA light chain |
| BAP049-Clone-E HC | |
| SEQ ID NO: 501 (Kabat) | HCDR1 |
| SEQ ID NO: 502 (Kabat) | HCDR2 |
| SEQ ID NO: 503 (Kabat) | HCDR3 |
| SEQ ID NO: 504 (Chothia) | HCDR1 |
| SEQ ID NO: 505 (Chothia) | HCDR2 |
| SEQ ID NO: 503 (Chothia) | HCDR3 |
| SEQ ID NO: 506 | VH |
| SEQ ID NO: 507 | DNA VH |
| SEQ ID NO: 508 | Heavy chain |
| SEQ ID NO: 509 | DNA heavy chain |
| BAP049-Clone-E LC | |
| SEQ ID NO: 510 (Kabat) | LCDR1 |
| SEQ ID NO: 511 (Kabat) | LCDR2 |
| SEQ ID NO: 512 (Kabat) | LCDR3 |
| SEQ ID NO: 513 (Chothia) | LCDR1 |
| SEQ ID NO: 514 (Chothia) | LCDR2 |
| SEQ ID NO: 515 (Chothia) | LCDR3 |
| SEQ ID NO: 520 | VL |
| SEQ ID NO: 521 | DNA VL |
| SEQ ID NO: 522 | Light chain |
| SEQ ID NO: 523 | DNA light chain |
| BAP049-Clone-B HC | |
| SEQ ID NO: 524 (Kabat) | HCDR1 |
| SEQ ID NO: 525 (Kabat) | HCDR2 |
| SEQ ID NO: 526 (Kabat) | HCDR3 |
| SEQ ID NO: 527 (Chothia) | HCDR1 |
| SEQ ID NO: 528 (Chothia) | HCDR2 |
| SEQ ID NO: 526 (Chothia) | HCDR3 |
| BAP049-Clone-B LC | |
| SEQ ID NO: 529 (Kabat) | LCDR1 |
| SEQ ID NO: 530 (Kabat) | LCDR2 |
| SEQ ID NO: 531 (Kabat) | LCDR3 |
| SEQ ID NO: 532 (Chothia) | LCDR1 |
| SEQ ID NO: 533 (Chothia) | LCDR2 |
| SEQ ID NO: 534 (Chothia) | LCDR3 |
| BAP049-Clone-E HC | |
| SEQ ID NO: 524 (Kabat) | HCDR1 |
| SEQ ID NO: 525 (Kabat) | HCDR2 |
| SEQ ID NO: 526 (Kabat) | HCDR3 |
| SEQ ID NO: 527 (Chothia) | HCDR1 |
| SEQ ID NO: 528 (Chothia) | HCDR2 |
| SEQ ID NO: 526 (Chothia) | HCDR3 |
| BAP049-Clone-E LC | |
| SEQ ID NO: 529 (Kabat) | LCDR1 |
| SEQ ID NO: 530 (Kabat) | LCDR2 |
| SEQ ID NO: 531 (Kabat) | LCDR3 |
| SEQ ID NO: 532 (Chothia) | LCDR1 |
| SEQ ID NO: 533 (Chothia) | LCDR2 |
| SEQ ID NO: 534 (Chothia) | LCDR3 |

### Other Exemplary PD-1 Inhibitors

[1014] In one embodiment, the anti-PD-1 antibody molecule is Nivolumab (Bristol-Myers Squibb), also known as MDX-1106, MDX-1106-04, ONO-4538, BMS-936558, or OPDIVO®. Nivolumab (clone 5C4) and other anti-PD-1 antibodies are disclosed in U.S. Pat. No. 8,008,449 and WO 2006/121168, incorporated by reference in their entirety. In one embodiment, the anti-PD-1 antibody molecule comprises one or more of the CDR sequences (or collectively all of the CDR sequences), the heavy chain or light chain variable region sequence, or the heavy chain or light chain sequence of Nivolumab, e.g., as disclosed in Table 19.

[1015] In one embodiment, the anti-PD-1 antibody molecule is Pembrolizumab (Merck & Co), also known as Lambrolizumab, MK-3475, MK03475, SCH-900475, or KEYTRUDA®. Pembrolizumab and other anti-PD-1 antibodies are disclosed in Hamid, O. et al. (2013) New England Journal of Medicine 369 (2): 134-44, U.S. Pat. No. 8,354,509, and WO 2009/114335, incorporated by reference in their entirety. In one embodiment, the anti-PD-1 antibody molecule comprises one or more of the CDR sequences (or collectively all of the CDR sequences), the heavy chain or light chain variable region sequence, or the heavy chain or light chain sequence of Pembrolizumab, e.g., as disclosed in Table 19.

[1016] In one embodiment, the anti-PD-1 antibody molecule is Pidilizumab (CureTech), also known as CT-011. Pidilizumab and other anti-PD-1 antibodies are disclosed in Rosenblatt, J. et al. (2011) J Immunotherapy 34(5): 409-18, U.S. Pat. Nos. 7,695,715, 7,332,582, and 8,686,119, incorporated by reference in their entirety. In one embodiment, the anti-PD-1 antibody molecule comprises one or more of the CDR sequences (or collectively all of the CDR sequences), the heavy chain or light chain variable region sequence, or the heavy chain or light chain sequence of Pidilizumab, e.g., as disclosed in Table 19.

[1017] In one embodiment, the anti-PD-1 antibody molecule is MEDI0680 (Medimmune), also known as AMP-514. MEDI0680 and other anti-PD-1 antibodies are disclosed in U.S. Pat. No. 9,205,148 and WO 2012/145493, incorporated by reference in their entirety. In one embodiment, the anti-PD-1 antibody molecule comprises one or more of the CDR sequences (or collectively all of the CDR sequences), the heavy chain or light chain variable region sequence, or the heavy chain or light chain sequence of MEDI0680.

[1018] In one embodiment, the anti-PD-1 antibody molecule is REGN2810 (Regeneron). In one embodiment, the anti-PD-1 antibody molecule comprises one or more of the CDR sequences (or collectively all of the CDR sequences), the heavy chain or light chain variable region sequence, or the heavy chain or light chain sequence of REGN2810.

[1019] In one embodiment, the anti-PD-1 antibody molecule is PF-06801591 (Pfizer). In one embodiment, the anti-PD-1 antibody molecule comprises one or more of the CDR sequences (or collectively all of the CDR sequences), the heavy chain or light chain variable region sequence, or the heavy chain or light chain sequence of PF-06801591.

[1020] In one embodiment, the anti-PD-1 antibody molecule is BGB-A317 or BGB-108 (Beigene). In one embodiment, the anti-PD-1 antibody molecule comprises one or more of the CDR sequences (or collectively all of the CDR sequences), the heavy chain or light chain variable region sequence, or the heavy chain or light chain sequence of BGB-A317 or BGB-108.

[1021] In one embodiment, the anti-PD-1 antibody molecule is INCSHR1210 (Incyte), also known as INCSHR01210 or SHR-1210. In one embodiment, the anti-PD-1 antibody molecule comprises one or more of the CDR sequences (or collectively all of the CDR sequences), the heavy chain or light chain variable region sequence, or the heavy chain or light chain sequence of INCSHR1210.

[1022] In one embodiment, the anti-PD-1 antibody molecule is TSR-042 (Tesaro), also known as ANB011. In one embodiment, the anti-PD-1 antibody molecule comprises one or more of the CDR sequences (or collectively all of the CDR sequences), the heavy chain or light chain variable region sequence, or the heavy chain or light chain sequence of TSR-042.

[1023] Further known anti-PD-1 antibodies include those described, e.g., in WO 2015/112800, WO 2016/092419, WO 2015/085847, WO 2014/179664, WO 2014/194302, WO 2014/209804, WO 2015/200119, U.S. Pat. Nos. 8,735,553, 7,488,802, 8,927,697, 8,993,731, and 9,102,727, incorporated by reference in their entirety.

[1024] In one embodiment, the anti-PD-1 antibody is an antibody that competes for binding with, and/or binds to the same epitope on PD-1 as, one of the anti-PD-1 antibodies described herein.

[1025] In one embodiment, the PD-1 inhibitor is a peptide that inhibits the PD-1 signaling pathway, e.g., as described in U.S. Pat. No. 8,907,053, incorporated by reference in its entirety. In one embodiment, the PD-1 inhibitor is an immunoadhesin (e.g., an immunoadhesin comprising an extracellular or PD-1 binding portion of PD-L1 or PD-L2 fused to a constant region (e.g., an Fc region of an immunoglobulin sequence). In one embodiment, the PD-1 inhibitor is AMP-224 (B7-DCIg (Amplimmune), e.g., disclosed in WO 2010/027827 and WO 2011/066342, incorporated by reference in their entirety).

TABLE 19
Amino acid sequences of other exemplary
anti-PD-1 antibody molecules

| | |
|---|---|
| Nivolumab | |
| SEQ ID NO: 535 | Heavy chain |
| SEQ ID NO: 536 | Light chain |
| Pembrolizumab | |
| SEQ ID NO: 537 | Heavy chain |
| SEQ ID NO: 538 | Light chain |
| Pidilizumab | |
| SEQ ID NO: 539 | Heavy chain |
| SEQ ID NO: 540 | Light chain |

### PD-L1 Inhibitors

[1026] In some embodiments, the BCMA CAR-expressing cell therapy is administered in combination with a PD-L1 inhibitor. In some embodiments, the PD-L1 inhibitor is chosen from FAZ053 (Novartis), Atezolizumab (Genentech/Roche), Avelumab (Merck Serono and Pfizer), Durvalumab (MedImmune/AstraZeneca), or BMS-936559 (Bristol-Myers Squibb).

### Exemplary PD-L1 Inhibitors

[1027] In one embodiment, the PD-L1 inhibitor is an anti-PD-L1 antibody molecule. In one embodiment, the PD-L1 inhibitor is an anti-PD-L1 antibody molecule as disclosed in US 2016/0108123, published on Apr. 21, 2016, entitled “Antibody Molecules to PD-L1 and Uses Thereof,” incorporated by reference in its entirety.

[1028] In one embodiment, the anti-PD-L1 antibody molecule comprises at least one, two, three, four, five or six complementarity determining regions (CDRs) (or collectively all of the CDRs) from a heavy and light chain variable region comprising an amino acid sequence shown in Table 20 (e.g., from the heavy and light chain variable region sequences of BAP058-Clone 0 or BAP058-Clone N disclosed in Table 20), or encoded by a nucleotide sequence shown in Table 20. In some embodiments, the CDRs are according to the Kabat definition (e.g., as set out in Table 20). In some embodiments, the CDRs are according to the Chothia definition (e.g., as set out in Table 20). In some embodiments, the CDRs are according to the combined CDR definitions of both Kabat and Chothia (e.g., as set out in Table 20). In one embodiment, the combination of Kabat and Chothia CDR of VH CDR1 comprises the amino acid sequence GYTFTSYWMY (SEQ ID NO: 647). In one embodiment, one or more of the CDRs (or collectively all of the CDRs) have one, two, three, four, five, six or more changes, e.g., amino acid substitutions (e.g., conservative amino acid substitutions) or deletions, relative to an amino acid sequence shown in Table 20, or encoded by a nucleotide sequence shown in Table 20.

[1029] In one embodiment, the anti-PD-L1 antibody molecule comprises a heavy chain variable region (VH) comprising a VHCDR1 amino acid sequence of SEQ ID NO: 601, a VHCDR2 amino acid sequence of SEQ ID NO: 602, and a VHCDR3 amino acid sequence of SEQ ID NO: 603; and a light chain variable region (VL) comprising a VLCDR1 amino acid sequence of SEQ ID NO: 609, a VLCDR2 amino acid sequence of SEQ ID NO: 610, and a VLCDR3 amino acid sequence of SEQ ID NO: 611, each disclosed in Table 20.

[1030] In one embodiment, the anti-PD-L1 antibody molecule comprises a VH comprising a VHCDR1 encoded by the nucleotide sequence of SEQ ID NO: 628, a VHCDR2 encoded by the nucleotide sequence of SEQ ID NO: 629, and a VHCDR3 encoded by the nucleotide sequence of SEQ ID NO: 630; and a VL comprising a VLCDR1 encoded by the nucleotide sequence of SEQ ID NO: 633, a VLCDR2 encoded by the nucleotide sequence of SEQ ID NO: 634, and a VLCDR3 encoded by the nucleotide sequence of SEQ ID NO: 635, each disclosed in Table 20.

[1031] In one embodiment, the anti-PD-L1 antibody molecule comprises a VH comprising the amino acid sequence of SEQ ID NO: 606, or an amino acid sequence at least 85%, 90%, 95%, or 99% identical or higher to SEQ ID NO: 606. In one embodiment, the anti-PD-L1 antibody molecule comprises a VL comprising the amino acid sequence of SEQ ID NO: 616, or an amino acid sequence at least 85%, 90%, 95%, or 99% identical or higher to SEQ ID NO: 616. In one embodiment, the anti-PD-L1 antibody molecule comprises a VH comprising the amino acid sequence of SEQ ID NO: 620, or an amino acid sequence at least 85%, 90%, 95%, or 99% identical or higher to SEQ ID NO: 620. In one embodiment, the anti-PD-L1 antibody molecule comprises a VL comprising the amino acid sequence of SEQ ID NO: 624, or an amino acid sequence at least 85%, 90%, 95%, or 99% identical or higher to SEQ ID NO: 624. In one embodiment, the anti-PD-L1 antibody molecule comprises a VH comprising the amino acid sequence of SEQ ID NO: 606 and a VL comprising the amino acid sequence of SEQ ID NO: 616. In one embodiment, the anti-PD-L1 antibody molecule comprises a VH comprising the amino acid sequence of SEQ ID NO: 620 and a VL comprising the amino acid sequence of SEQ ID NO: 624.

[1032] In one embodiment, the antibody molecule comprises a VH encoded by the nucleotide sequence of SEQ ID NO: 607, or a nucleotide sequence at least 85%, 90%, 95%, or 99% identical or higher to SEQ ID NO: 607. In one embodiment, the antibody molecule comprises a VL encoded by the nucleotide sequence of SEQ ID NO: 617, or a nucleotide sequence at least 85%, 90%, 95%, or 99% identical or higher to SEQ ID NO: 617. In one embodiment, the antibody molecule comprises a VH encoded by the nucleotide sequence of SEQ ID NO: 621, or a nucleotide sequence at least 85%, 90%, 95%, or 99% identical or higher to SEQ ID NO: 621. In one embodiment, the antibody molecule comprises a VL encoded by the nucleotide sequence of SEQ ID NO: 625, or a nucleotide sequence at least 85%, 90%, 95%, or 99% identical or higher to SEQ ID NO: 625. In one embodiment, the antibody molecule comprises a VH encoded by the nucleotide sequence of SEQ ID NO: 607 and a VL encoded by the nucleotide sequence of SEQ ID NO: 617. In one embodiment, the antibody molecule comprises a VH encoded by the nucleotide sequence of SEQ ID NO: 621 and a VL encoded by the nucleotide sequence of SEQ ID NO: 625.

[1033] In one embodiment, the anti-PD-L1 antibody molecule comprises a heavy chain comprising the amino acid sequence of SEQ ID NO: 608, or an amino acid sequence at least 85%, 90%, 95%, or 99% identical or higher to SEQ ID NO: 608. In one embodiment, the anti-PD-L1 antibody molecule comprises a light chain comprising the amino acid sequence of SEQ ID NO: 618, or an amino acid sequence at least 85%, 90%, 95%, or 99% identical or higher to SEQ ID NO: 618. In one embodiment, the anti-PD-L1 antibody molecule comprises a heavy chain comprising the amino acid sequence of SEQ ID NO: 622, or an amino acid sequence at least 85%, 90%, 95%, or 99% identical or higher to SEQ ID NO: 622. In one embodiment, the anti-PD-L1 antibody molecule comprises a light chain comprising the amino acid sequence of SEQ ID NO: 626, or an amino acid sequence at least 85%, 90%, 95%, or 99% identical or higher to SEQ ID NO: 626. In one embodiment, the anti-PD-L1 antibody molecule comprises a heavy chain comprising the amino acid sequence of SEQ ID NO: 608 and a light chain comprising the amino acid sequence of SEQ ID NO: 618. In one embodiment, the anti-PD-L1 antibody molecule comprises a heavy chain comprising the amino acid sequence of SEQ ID NO: 622 and a light chain comprising the amino acid sequence of SEQ ID NO: 626.

[1034] In one embodiment, the antibody molecule comprises a heavy chain encoded by the nucleotide sequence of SEQ ID NO: 615, or a nucleotide sequence at least 85%, 90%, 95%, or 99% identical or higher to SEQ ID NO: 615. In one embodiment, the antibody molecule comprises a light chain encoded by the nucleotide sequence of SEQ ID NO: 619, or a nucleotide sequence at least 85%, 90%, 95%, or 99% identical or higher to SEQ ID NO: 619. In one embodiment, the antibody molecule comprises a heavy chain encoded by the nucleotide sequence of SEQ ID NO: 623, or a nucleotide sequence at least 85%, 90%, 95%, or 99% identical or higher to SEQ ID NO: 623. In one embodiment, the antibody molecule comprises a light chain encoded by the nucleotide sequence of SEQ ID NO: 627, or a nucleotide sequence at least 85%, 90%, 95%, or 99% identical or higher to SEQ ID NO: 627. In one embodiment, the antibody molecule comprises a heavy chain encoded by the nucleotide sequence of SEQ ID NO: 615 and a light chain encoded by the nucleotide sequence of SEQ ID NO: 619. In one embodiment, the antibody molecule comprises a heavy chain encoded by the nucleotide sequence of SEQ ID NO: 623 and a light chain encoded by the nucleotide sequence of SEQ ID NO: 627. The antibody molecules described herein can be made by vectors, host cells, and methods described in US 2016/0108123, incorporated by reference in its entirety.

TABLE 20
Amino acid and nucleotide sequences of
exemplary anti-PD-L1 antibody molecules

| | |
|---|---|
| BAP058-Clone O HC | |
| SEQ ID NO: 601 (Kabat) | HCDR1 |
| SEQ ID NO: 602 (Kabat) | HCDR2 |
| SEQ ID NO: 603 (Kabat) | HCDR3 |
| SEQ ID NO: 604 (Chothia) | HCDR1 |
| SEQ ID NO: 605 (Chothia) | HCDR2 |
| SEQ ID NO: 603 (Chothia) | HCDR3 |
| SEQ ID NO: 606 | VH |
| SEQ ID NO: 607 | DNA VH |
| SEQ ID NO: 608 | Heavy chain |
| SEQ ID NO: 615 | DNA heavy chain |
| BAP058-Clone O LC | |
| SEQ ID NO: 609 (Kabat) | LCDR1 |
| SEQ ID NO: 610 (Kabat) | LCDR2 |
| SEQ ID NO: 611 (Kabat) | LCDR3 |
| SEQ ID NO: 612 (Chothia) | LCDR1 |
| SEQ ID NO: 613 (Chothia) | LCDR2 |
| SEQ ID NO: 614 (Chothia) | LCDR3 |
| SEQ ID NO: 616 | VL |
| SEQ ID NO: 617 | DNA VL |
| SEQ ID NO: 618 | Light chain |
| SEQ ID NO: 619 | DNA light chain |
| BAP058-Clone N HC | |
| SEQ ID NO: 601 (Kabat) | HCDR1 |
| SEQ ID NO: 602 (Kabat) | HCDR2 |
| SEQ ID NO: 603 (Kabat) | HCDR3 |
| SEQ ID NO: 604 (Chothia) | HCDR1 |
| SEQ ID NO: 605 (Chothia) | HCDR2 |
| SEQ ID NO: 603 (Chothia) | HCDR3 |
| SEQ ID NO: 620 | VH |
| SEQ ID NO: 621 | DNA VH |
| SEQ ID NO: 622 | Heavy chain |
| SEQ ID NO: 623 | DNA heavy chain |
| BAP058-Clone N LC | |
| SEQ ID NO: 609 (Kabat) | LCDR1 |
| SEQ ID NO: 610 (Kabat) | LCDR2 |
| SEQ ID NO: 611 (Kabat) | LCDR3 |
| SEQ ID NO: 612 (Chothia) | LCDR1 |
| SEQ ID NO: 613 (Chothia) | LCDR2 |
| SEQ ID NO: 614 (Chothia) | LCDR3 |
| SEQ ID NO: 624 | VL |
| SEQ ID NO: 625 | DNA VL |
| SEQ ID NO: 626 | Light chain |
| SEQ ID NO: 627 | DNA light chain |
| BAP058-Clone O HC | |
| SEQ ID NO: 628 (Kabat) | HCDR1 |
| SEQ ID NO: 629 (Kabat) | HCDR2 |
| SEQ ID NO: 630 (Kabat) | HCDR3 |
| SEQ ID NO: 631 (Chothia) | HCDR1 |
| SEQ ID NO: 632 (Chothia) | HCDR2 |
| SEQ ID NO: 630 (Chothia) | HCDR3 |
| BAP058-Clone O LC | |
| SEQ ID NO: 633 (Kabat) | LCDR1 |
| SEQ ID NO: 634 (Kabat) | LCDR2 |
| SEQ ID NO: 635 (Kabat) | LCDR3 |
| SEQ ID NO: 636 (Chothia) | LCDR1 |
| SEQ ID NO: 637 (Chothia) | LCDR2 |
| SEQ ID NO: 638 (Chothia) | LCDR3 |
| BAP058-Clone N HC | |
| SEQ ID NO: 628 (Kabat) | HCDR1 |
| SEQ ID NO: 629 (Kabat) | HCDR2 |
| SEQ ID NO: 630 (Kabat) | HCDR3 |
| SEQ ID NO: 631 (Chothia) | HCDR1 |
| SEQ ID NO: 632 (Chothia) | HCDR2 |
| SEQ ID NO: 630 (Chothia) | HCDR3 |
| BAP058-Clone N LC | |
| SEQ ID NO: 633 (Kabat) | LCDR1 |
| SEQ ID NO: 634 (Kabat) | LCDR2 |
| SEQ ID NO: 635 (Kabat) | LCDR3 |
| SEQ ID NO: 636 (Chothia) | LCDR1 |
| SEQ ID NO: 637 (Chothia) | LCDR2 |
| SEQ ID NO: 638 (Chothia) | LCDR3 |

### Other Exemplary PD-L1 Inhibitors

[1035] In one embodiment, the anti-PD-L1 antibody molecule is Atezolizumab (Genentech/Roche), also known as MPDL3280A, RG7446, R05541267, YW243.55.S70, or TECENTRIQ™. Atezolizumab and other anti-PD-L1 antibodies are disclosed in U.S. Pat. No. 8,217,149, incorporated by reference in its entirety. In one embodiment, the anti-PD-L1 antibody molecule comprises one or more of the CDR sequences (or collectively all of the CDR sequences), the heavy chain or light chain variable region sequence, or the heavy chain or light chain sequence of Atezolizuma, e.g., as disclosed in Table 21.

[1036] In one embodiment, the anti-PD-L1 antibody molecule is Avelumab (Merck Serono and Pfizer), also known as MSB0010718C. Avelumab and other anti-PD-L1 antibodies are disclosed in WO 2013/079174, incorporated by reference in its entirety. In one embodiment, the anti-PD-L1 antibody molecule comprises one or more of the CDR sequences (or collectively all of the CDR sequences), the heavy chain or light chain variable region sequence, or the heavy chain or light chain sequence of Avelumab, e.g., as disclosed in Table 21.

[1037] In one embodiment, the anti-PD-L1 antibody molecule is Durvalumab (MedImmune/AstraZeneca), also known as MEDI4736. Durvalumab and other anti-PD-L1 antibodies are disclosed in U.S. Pat. No. 8,779,108, incorporated by reference in its entirety. In one embodiment, the anti-PD-L1 antibody molecule comprises one or more of the CDR sequences (or collectively all of the CDR sequences), the heavy chain or light chain variable region sequence, or the heavy chain or light chain sequence of Durvalumab, e.g., as disclosed in Table 21.

[1038] In one embodiment, the anti-PD-L1 antibody molecule is BMS-936559 (Bristol-Myers Squibb), also known as MDX-1105 or 12A4. BMS-936559 and other anti-PD-L1 antibodies are disclosed in U.S. Pat. No. 7,943,743 and WO 2015/081158, incorporated by reference in their entirety. In one embodiment, the anti-PD-L1 antibody molecule comprises one or more of the CDR sequences (or collectively all of the CDR sequences), the heavy chain or light chain variable region sequence, or the heavy chain or light chain sequence of BMS-936559, e.g., as disclosed in Table 21.

[1039] Further known anti-PD-L1 antibodies include those described, e.g., in WO 2015/181342, WO 2014/100079, WO 2016/000619, WO 2014/022758, WO 2014/055897, WO 2015/061668, WO 2013/079174, WO 2012/145493, WO 2015/112805, WO 2015/109124, WO 2015/195163, U.S. Pat. Nos. 8,168,179, 8,552,154, 8,460,927, and 9,175,082, incorporated by reference in their entirety.

[1040] In one embodiment, the anti-PD-L1 antibody is an antibody that competes for binding with, and/or binds to the same epitope on PD-L1 as, one of the anti-PD-L1 antibodies described herein.

TABLE 21
Amino acid sequences of other exemplary
anti-PD-L1 antibody molecules

| | |
|---|---|
| Atezolizumab | |
| SEQ ID NO: 639 | Heavy chain |
| SEQ ID NO: 640 | Light chain |
| Avelumab | |
| SEQ ID NO: 641 | Heavy chain |
| SEQ ID NO: 642 | Light chain |
| Durvalumab | |
| SEQ ID NO: 643 | Heavy chain |
| SEQ ID NO: 644 | Light chain |
| BMS-936559 | |
| SEQ ID NO: 645 | VH |
| SEQ ID NO: 646 | VL |

### LAG-3 Inhibitors

[1041] In some embodiments, the BCMA CAR-expressing cell therapy is administered in combination with a LAG-3 inhibitor. In some embodiments, the LAG-3 inhibitor is chosen from LAG525 (Novartis), BMS-986016 (Bristol-Myers Squibb), or TSR-033 (Tesaro).

### Exemplary LAG-3 Inhibitors

[1042] In one embodiment, the LAG-3 inhibitor is an anti-LAG-3 antibody molecule. In one embodiment, the LAG-3 inhibitor is an anti-LAG-3 antibody molecule as disclosed in US 2015/0259420, published on Sep. 17, 2015, entitled “Antibody Molecules to LAG-3 and Uses Thereof,” incorporated by reference in its entirety.

[1043] In one embodiment, the anti-LAG-3 antibody molecule comprises at least one, two, three, four, five or six complementarity determining regions (CDRs) (or collectively all of the CDRs) from a heavy and light chain variable region comprising an amino acid sequence shown in Table 22 (e.g., from the heavy and light chain variable region sequences of BAP050-Clone I or BAP050-Clone J disclosed in Table 22), or encoded by a nucleotide sequence shown in Table 22. In some embodiments, the CDRs are according to the Kabat definition (e.g., as set out in Table 22). In some embodiments, the CDRs are according to the Chothia definition (e.g., as set out in Table 22). In some embodiments, the CDRs are according to the combined CDR definitions of both Kabat and Chothia (e.g., as set out in Table 22). In one embodiment, the combination of Kabat and Chothia CDR of VH CDR1 comprises the amino acid sequence GFTLTNYGMN (SEQ ID NO: 766). In one embodiment, one or more of the CDRs (or collectively all of the CDRs) have one, two, three, four, five, six or more changes, e.g., amino acid substitutions (e.g., conservative amino acid substitutions) or deletions, relative to an amino acid sequence shown in Table 22, or encoded by a nucleotide sequence shown in Table 22.

[1044] In one embodiment, the anti-LAG-3 antibody molecule comprises a heavy chain variable region (VH) comprising a VHCDR1 amino acid sequence of SEQ ID NO: 701, a VHCDR2 amino acid sequence of SEQ ID NO: 702, and a VHCDR3 amino acid sequence of SEQ ID NO: 703; and a light chain variable region (VL) comprising a VLCDR1 amino acid sequence of SEQ ID NO: 710, a VLCDR2 amino acid sequence of SEQ ID NO: 711, and a VLCDR3 amino acid sequence of SEQ ID NO: 712, each disclosed in Table 22.

[1045] In one embodiment, the anti-LAG-3 antibody molecule comprises a VH comprising a VHCDR1 encoded by the nucleotide sequence of SEQ ID NO: 736 or 737, a VHCDR2 encoded by the nucleotide sequence of SEQ ID NO: 738 or 739, and a VHCDR3 encoded by the nucleotide sequence of SEQ ID NO: 740 or 741; and a VL comprising a VLCDR1 encoded by the nucleotide sequence of SEQ ID NO: 746 or 747, a VLCDR2 encoded by the nucleotide sequence of SEQ ID NO: 748 or 749, and a VLCDR3 encoded by the nucleotide sequence of SEQ ID NO: 750 or 751, each disclosed in Table 22.

[1046] In one embodiment, the anti-LAG-3 antibody molecule comprises a VH comprising a VHCDR1 encoded by the nucleotide sequence of SEQ ID NO: 758 or 737, a VHCDR2 encoded by the nucleotide sequence of SEQ ID NO: 759 or 739, and a VHCDR3 encoded by the nucleotide sequence of SEQ ID NO: 760 or 741; and a VL comprising a VLCDR1 encoded by the nucleotide sequence of SEQ ID NO: 746 or 747, a VLCDR2 encoded by the nucleotide sequence of SEQ ID NO: 748 or 749, and a VLCDR3 encoded by the nucleotide sequence of SEQ ID NO: 750 or 751, each disclosed in Table 22.

[1047] In one embodiment, the anti-LAG-3 antibody molecule comprises a VH comprising the amino acid sequence of SEQ ID NO: 706, or an amino acid sequence at least 85%, 90%, 95%, or 99% identical or higher to SEQ ID NO: 706. In one embodiment, the anti-LAG-3 antibody molecule comprises a VL comprising the amino acid sequence of SEQ ID NO: 718, or an amino acid sequence at least 85%, 90%, 95%, or 99% identical or higher to SEQ ID NO: 718. In one embodiment, the anti-LAG-3 antibody molecule comprises a VH comprising the amino acid sequence of SEQ ID NO: 724, or an amino acid sequence at least 85%, 90%, 95%, or 99% identical or higher to SEQ ID NO: 724. In one embodiment, the anti-LAG-3 antibody molecule comprises a VL comprising the amino acid sequence of SEQ ID NO: 730, or an amino acid sequence at least 85%, 90%, 95%, or 99% identical or higher to SEQ ID NO: 730. In one embodiment, the anti-LAG-3 antibody molecule comprises a VH comprising the amino acid sequence of SEQ ID NO: 706 and a VL comprising the amino acid sequence of SEQ ID NO: 718. In one embodiment, the anti-LAG-3 antibody molecule comprises a VH comprising the amino acid sequence of SEQ ID NO: 724 and a VL comprising the amino acid sequence of SEQ ID NO: 730.

[1048] In one embodiment, the antibody molecule comprises a VH encoded by the nucleotide sequence of SEQ ID NO: 707 or 708, or a nucleotide sequence at least 85%, 90%, 95%, or 99% identical or higher to SEQ ID NO: 707 or 708. In one embodiment, the antibody molecule comprises a VL encoded by the nucleotide sequence of SEQ ID NO: 719 or 720, or a nucleotide sequence at least 85%, 90%, 95%, or 99% identical or higher to SEQ ID NO: 719 or 720. In one embodiment, the antibody molecule comprises a VH encoded by the nucleotide sequence of SEQ ID NO: 725 or 726, or a nucleotide sequence at least 85%, 90%, 95%, or 99% identical or higher to SEQ ID NO: 725 or 726. In one embodiment, the antibody molecule comprises a VL encoded by the nucleotide sequence of SEQ ID NO: 731 or 732, or a nucleotide sequence at least 85%, 90%, 95%, or 99% identical or higher to SEQ ID NO: 731 or 732. In one embodiment, the antibody molecule comprises a VH encoded by the nucleotide sequence of SEQ ID NO: 707 or 708 and a VL encoded by the nucleotide sequence of SEQ ID NO: 719 or 720. In one embodiment, the antibody molecule comprises a VH encoded by the nucleotide sequence of SEQ ID NO: 725 or 726 and a VL encoded by the nucleotide sequence of SEQ ID NO: 731 or 732.

[1049] In one embodiment, the anti-LAG-3 antibody molecule comprises a heavy chain comprising the amino acid sequence of SEQ ID NO: 709, or an amino acid sequence at least 85%, 90%, 95%, or 99% identical or higher to SEQ ID NO: 709. In one embodiment, the anti-LAG-3 antibody molecule comprises a light chain comprising the amino acid sequence of SEQ ID NO: 721, or an amino acid sequence at least 85%, 90%, 95%, or 99% identical or higher to SEQ ID NO: 721. In one embodiment, the anti-LAG-3 antibody molecule comprises a heavy chain comprising the amino acid sequence of SEQ ID NO: 727, or an amino acid sequence at least 85%, 90%, 95%, or 99% identical or higher to SEQ ID NO: 727. In one embodiment, the anti-LAG-3 antibody molecule comprises a light chain comprising the amino acid sequence of SEQ ID NO: 733, or an amino acid sequence at least 85%, 90%, 95%, or 99% identical or higher to SEQ ID NO: 733. In one embodiment, the anti-LAG-3 antibody molecule comprises a heavy chain comprising the amino acid sequence of SEQ ID NO: 709 and a light chain comprising the amino acid sequence of SEQ ID NO: 721. In one embodiment, the anti-LAG-3 antibody molecule comprises a heavy chain comprising the amino acid sequence of SEQ ID NO: 727 and a light chain comprising the amino acid sequence of SEQ ID NO: 733.

[1050] In one embodiment, the antibody molecule comprises a heavy chain encoded by the nucleotide sequence of SEQ ID NO: 716 or 717, or a nucleotide sequence at least 85%, 90%, 95%, or 99% identical or higher to SEQ ID NO: 716 or 717. In one embodiment, the antibody molecule comprises a light chain encoded by the nucleotide sequence of SEQ ID NO: 722 or 723, or a nucleotide sequence at least 85%, 90%, 95%, or 99% identical or higher to SEQ ID NO: 722 or 723. In one embodiment, the antibody molecule comprises a heavy chain encoded by the nucleotide sequence of SEQ ID NO: 728 or 729, or a nucleotide sequence at least 85%, 90%, 95%, or 99% identical or higher to SEQ ID NO: 728 or 729. In one embodiment, the antibody molecule comprises a light chain encoded by the nucleotide sequence of SEQ ID NO: 734 or 735, or a nucleotide sequence at least 85%, 90%, 95%, or 99% identical or higher to SEQ ID NO: 734 or 735. In one embodiment, the antibody molecule comprises a heavy chain encoded by the nucleotide sequence of SEQ ID NO: 716 or 717 and a light chain encoded by the nucleotide sequence of SEQ ID NO: 722 or 723. In one embodiment, the antibody molecule comprises a heavy chain encoded by the nucleotide sequence of SEQ ID NO: 728 or 729 and a light chain encoded by the nucleotide sequence of SEQ ID NO: 734 or 735.

[1051] The antibody molecules described herein can be made by vectors, host cells, and methods described in US 2015/0259420, incorporated by reference in its entirety.

TABLE 22
Amino acid and nucleotide sequences of
exemplary anti-LAG-3 antibody molecules

| | |
|---|---|
| BAP050-Clone I HC | |
| SEQ ID NO: 701 (Kabat) | HCDR1 |
| SEQ ID NO: 702 (Kabat) | HCDR2 |
| SEQ ID NO: 703 (Kabat) | HCDR3 |
| SEQ ID NO: 704 (Chothia) | HCDR1 |
| SEQ ID NO: 705 (Chothia) | HCDR2 |
| SEQ ID NO: 703 (Chothia) | HCDR3 |
| SEQ ID NO: 706 | VH |
| SEQ ID NO: 707 | DNA VH |
| SEQ ID NO: 708 | DNA VH |
| SEQ ID NO: 709 | Heavy chain |
| SEQ ID NO: 716 | DNA heavy chain |
| SEQ ID NO: 717 | DNA heavy chain |
| BAP050-Clone I LC | |
| SEQ ID NO: 710 (Kabat) | LCDR1 |
| SEQ ID NO: 711 (Kabat) | LCDR2 |
| SEQ ID NO: 712 (Kabat) | LCDR3 |
| SEQ ID NO: 713 (Chothia) | LCDR1 |
| SEQ ID NO: 714 (Chothia) | LCDR2 |
| SEQ ID NO: 715 (Chothia) | LCDR3 |
| SEQ ID NO: 718 | VL |
| SEQ ID NO: 719 | DNA VL |
| SEQ ID NO: 720 | DNA VL |
| SEQ ID NO: 721 | Light chain |
| SEQ ID NO: 722 | DNA light chain |
| SEQ ID NO: 723 | DNA light chain |
| BAP050-Clone J HC | |
| SEQ ID NO: 701 (Kabat) | HCDR1 |
| SEQ ID NO: 702 (Kabat) | HCDR2 |
| SEQ ID NO: 703 (Kabat) | HCDR3 |
| SEQ ID NO: 704 (Chothia) | HCDR1 |
| SEQ ID NO: 705 (Chothia) | HCDR2 |
| SEQ ID NO: 703 (Chothia) | HCDR3 |
| SEQ ID NO: 724 | VH |
| SEQ ID NO: 725 | DNA VH |
| SEQ ID NO: 726 | DNA VH |
| SEQ ID NO: 727 | Heavy chain |
| SEQ ID NO: 728 | DNA heavy chain |
| SEQ ID NO: 729 | DNA heavy chain |
| BAP050-Clone J LC | |
| SEQ ID NO: 710 (Kabat) | LCDR1 |
| SEQ ID NO: 711 (Kabat) | LCDR2 |
| SEQ ID NO: 712 (Kabat) | LCDR3 |
| SEQ ID NO: 713 (Chothia) | LCDR1 |
| SEQ ID NO: 714 (Chothia) | LCDR2 |
| SEQ ID NO: 715 (Chothia) | LCDR3 |
| SEQ ID NO: 730 | VL |
| SEQ ID NO: 731 | DNA VL |
| SEQ ID NO: 732 | DNA VL |
| SEQ ID NO: 733 | Light chain |
| SEQ ID NO: 734 | DNA light chain |
| SEQ ID NO: 735 | DNA light chain |
| BAP050-Clone I HC | |
| SEQ ID NO: 736 (Kabat) | HCDR1 |
| SEQ ID NO: 737 (Kabat) | HCDR1 |
| SEQ ID NO: 738 (Kabat) | HCDR2 |
| SEQ ID NO: 739 (Kabat) | HCDR2 |
| SEQ ID NO: 740 (Kabat) | HCDR3 |
| SEQ ID NO: 741 (Kabat) | HCDR3 |
| SEQ ID NO: 742 (Chothia) | HCDR1 |
| SEQ ID NO: 743 (Chothia) | HCDR1 |
| SEQ ID NO: 744 (Chothia) | HCDR2 |
| SEQ ID NO: 745 (Chothia) | HCDR2 |
| SEQ ID NO: 740 (Chothia) | HCDR3 |
| SEQ ID NO: 741 (Chothia) | HCDR3 |
| BAP050-Clone I LC | |
| SEQ ID NO: 746 (Kabat) | LCDR1 |
| SEQ ID NO: 747 (Kabat) | LCDR1 |
| SEQ ID NO: 748 (Kabat) | LCDR2 |
| SEQ ID NO: 749 (Kabat) | LCDR2 |
| SEQ ID NO: 750 (Kabat) | LCDR3 |
| SEQ ID NO: 751 (Kabat) | LCDR3 |
| SEQ ID NO: 752 (Chothia) | LCDR1 |
| SEQ ID NO: 753 (Chothia) | LCDR1 |
| SEQ ID NO: 754 (Chothia) | LCDR2 |
| SEQ ID NO: 755 (Chothia) | LCDR2 |
| SEQ ID NO: 756 (Chothia) | LCDR3 |
| SEQ ID NO: 757 (Chothia) | LCDR3 |
| BAP050-Clone J HC | |
| SEQ ID NO: 758 (Kahat) | HCDR1 |
| SEQ ID NO: 737 (Kahat) | HCDR1 |
| SEQ ID NO: 759 (Kahat) | HCDR2 |
| SEQ ID NO: 739 (Kabat) | HCDR2 |
| SEQ ID NO: 760 (Kabat) | HCDR3 |
| SEQ ID NO: 741 (Kabat) | HCDR3 |
| SEQ ID NO: 761 (Chothia) | HCDR1 |
| SEQ ID NO: 743 (Chothia) | HCDR1 |
| SEQ ID NO: 744 (Chothia) | HCDR2 |
| SEQ ID NO: 745 (Chothia) | HCDR2 |
| SEQ ID NO: 760 (Chothia) | HCDR3 |
| SEQ ID NO: 741 (Chothia) | HCDR3 |
| BAP050-Clone J LC | |
| SEQ ID NO: 746 (Kabat) | LCDR1 |
| SEQ ID NO: 747 (Kabat) | LCDR1 |
| SEQ ID NO: 748 (Kabat) | LCDR2 |
| SEQ ID NO: 749 (Kabat) | LCDR2 |
| SEQ ID NO: 750 (Kabat) | LCDR3 |
| SEQ ID NO: 751 (Kabat) | LCDR3 |
| SEQ ID NO: 752 (Chothia) | LCDR1 |
| SEQ ID NO: 753 (Chothia) | LCDR1 |
| SEQ ID NO: 754 (Chothia) | LCDR2 |
| SEQ ID NO: 755 (Chothia) | LCDR2 |
| SEQ ID NO: 756 (Chothia) | LCDR3 |
| SEQ ID NO: 757 (Chothia) | LCDR3 |

### Other Exemplary LAG-3 Inhibitors

[1052] In one embodiment, the anti-LAG-3 antibody molecule is BMS-986016 (Bristol-Myers Squibb), also known as BMS986016. BMS-986016 and other anti-LAG-3 antibodies are disclosed in WO 2015/116539 and U.S. Pat. No. 9,505,839, incorporated by reference in their entirety. In one embodiment, the anti-LAG-3 antibody molecule comprises one or more of the CDR sequences (or collectively all of the CDR sequences), the heavy chain or light chain variable region sequence, or the heavy chain or light chain sequence of BMS-986016, e.g., as disclosed in Table 23.

[1053] In one embodiment, the anti-LAG-3 antibody molecule is TSR-033 (Tesaro). In one embodiment, the anti-LAG-3 antibody molecule comprises one or more of the CDR sequences (or collectively all of the CDR sequences), the heavy chain or light chain variable region sequence, or the heavy chain or light chain sequence of TSR-033.

[1054] In one embodiment, the anti-LAG-3 antibody molecule is IMP731 or GSK2831781 (GSK and Prima BioMed). IMP731 and other anti-LAG-3 antibodies are disclosed in WO 2008/132601 and U.S. Pat. No. 9,244,059, incorporated by reference in their entirety. In one embodiment, the anti-LAG-3 antibody molecule comprises one or more of the CDR sequences (or collectively all of the CDR sequences), the heavy chain or light chain variable region sequence, or the heavy chain or light chain sequence of IMP731, e.g., as disclosed in Table 23. In one embodiment, the anti-LAG-3 antibody molecule comprises one or more of the CDR sequences (or collectively all of the CDR sequences), the heavy chain or light chain variable region sequence, or the heavy chain or light chain sequence of GSK2831781.

[1055] In one embodiment, the anti-LAG-3 antibody molecule is IMP761 (Prima BioMed). In one embodiment, the anti-LAG-3 antibody molecule comprises one or more of the CDR sequences (or collectively all of the CDR sequences), the heavy chain or light chain variable region sequence, or the heavy chain or light chain sequence of IMP761.

[1056] Further known anti-LAG-3 antibodies include those described, e.g., in WO 2008/132601, WO 2010/019570, WO 2014/140180, WO 2015/116539, WO 2015/200119, WO 2016/028672, U.S. Pat. Nos. 9,244,059, 9,505,839, incorporated by reference in their entirety.

[1057] In one embodiment, the anti-LAG-3 antibody is an antibody that competes for binding with, and/or binds to the same epitope on LAG-3 as, one of the anti-LAG-3 antibodies described herein.

[1058] In one embodiment, the anti-LAG-3 inhibitor is a soluble LAG-3 protein, e.g., IMP321 (Prima BioMed), e.g., as disclosed in WO 2009/044273, incorporated by reference in its entirety.

TABLE 23
Amino acid sequences of other exemplary
anti-LAG-3 antibody molecules

| | |
|---|---|
| BMS-986016 | |
| SEQ ID NO: 762 | Heavy chain |
| SEQ ID NO: 763 | Light chain |
| IMP731 | |
| SEQ ID NO: 764 | Heavy chain |
| SEQ ID NO: 765 | Light chain |

### TIM-3 Inhibitors

[1059] In some embodiments, the BCMA CAR-expressing cell therapy is administered in combination with a TIM-3 inhibitor. In some embodiments, the TIM-3 inhibitor is MGB453 (Novartis) or TSR-022 (Tesaro).

### Exemplary TIM-3 Inhibitors

[1060] In one embodiment, the TIM-3 inhibitor is an anti-TIM-3 antibody molecule. In one embodiment, the TIM-3 inhibitor is an anti-TIM-3 antibody molecule as disclosed in US 2015/0218274, published on Aug. 6, 2015, entitled “Antibody Molecules to TIM-3 and Uses Thereof,” incorporated by reference in its entirety.

[1061] In one embodiment, the anti-TIM-3 antibody molecule comprises at least one, two, three, four, five or six complementarity determining regions (CDRs) (or collectively all of the CDRs) from a heavy and light chain variable region comprising an amino acid sequence shown in Table 24 (e.g., from the heavy and light chain variable region sequences of ABTIM3-hum11 or ABTIM3-hum03 disclosed in Table 24), or encoded by a nucleotide sequence shown in Table 24. In some embodiments, the CDRs are according to the Kabat definition (e.g., as set out in Table 24). In some embodiments, the CDRs are according to the Chothia definition (e.g., as set out in Table 24). In one embodiment, one or more of the CDRs (or collectively all of the CDRs) have one, two, three, four, five, six or more changes, e g, amino acid substitutions (e.g., conservative amino acid substitutions) or deletions, relative to an amino acid sequence shown in Table 24, or encoded by a nucleotide sequence shown in Table 24.

[1062] In one embodiment, the anti-TIM-3 antibody molecule comprises a heavy chain variable region (VH) comprising a VHCDR1 amino acid sequence of SEQ ID NO: 801, a VHCDR2 amino acid sequence of SEQ ID NO: 802, and a VHCDR3 amino acid sequence of SEQ ID NO: 803; and a light chain variable region (VL) comprising a VLCDR1 amino acid sequence of SEQ ID NO: 810, a VLCDR2 amino acid sequence of SEQ ID NO: 811, and a VLCDR3 amino acid sequence of SEQ ID NO: 812, each disclosed in Table 24. In one embodiment, the anti-TIM-3 antibody molecule comprises a heavy chain variable region (VH) comprising a VHCDR1 amino acid sequence of SEQ ID NO: 801, a VHCDR2 amino acid sequence of SEQ ID NO: 820, and a VHCDR3 amino acid sequence of SEQ ID NO: 803; and a light chain variable region (VL) comprising a VLCDR1 amino acid sequence of SEQ ID NO: 810, a VLCDR2 amino acid sequence of SEQ ID NO: 811, and a VLCDR3 amino acid sequence of SEQ ID NO: 812, each disclosed in Table 24.

[1063] In one embodiment, the anti-TIM-3 antibody molecule comprises a VH comprising the amino acid sequence of SEQ ID NO: 806, or an amino acid sequence at least 85%, 90%, 95%, or 99% identical or higher to SEQ ID NO: 806. In one embodiment, the anti-TIM-3 antibody molecule comprises a VL comprising the amino acid sequence of SEQ ID NO: 816, or an amino acid sequence at least 85%, 90%, 95%, or 99% identical or higher to SEQ ID NO: 816. In one embodiment, the anti-TIM-3 antibody molecule comprises a VH comprising the amino acid sequence of SEQ ID NO: 822, or an amino acid sequence at least 85%, 90%, 95%, or 99% identical or higher to SEQ ID NO: 822. In one embodiment, the anti-TIM-3 antibody molecule comprises a VL comprising the amino acid sequence of SEQ ID NO: 826, or an amino acid sequence at least 85%, 90%, 95%, or 99% identical or higher to SEQ ID NO: 826. In one embodiment, the anti-TIM-3 antibody molecule comprises a VH comprising the amino acid sequence of SEQ ID NO: 806 and a VL comprising the amino acid sequence of SEQ ID NO: 816. In one embodiment, the anti-TIM-3 antibody molecule comprises a VH comprising the amino acid sequence of SEQ ID NO: 822 and a VL comprising the amino acid sequence of SEQ ID NO: 826.

[1064] In one embodiment, the antibody molecule comprises a VH encoded by the nucleotide sequence of SEQ ID NO: 807, or a nucleotide sequence at least 85%, 90%, 95%, or 99% identical or higher to SEQ ID NO: 807. In one embodiment, the antibody molecule comprises a VL encoded by the nucleotide sequence of SEQ ID NO: 817, or a nucleotide sequence at least 85%, 90%, 95%, or 99% identical or higher to SEQ ID NO: 817. In one embodiment, the antibody molecule comprises a VH encoded by the nucleotide sequence of SEQ ID NO: 823, or a nucleotide sequence at least 85%, 90%, 95%, or 99% identical or higher to SEQ ID NO: 823. In one embodiment, the antibody molecule comprises a VL encoded by the nucleotide sequence of SEQ ID NO: 827, or a nucleotide sequence at least 85%, 90%, 95%, or 99% identical or higher to SEQ ID NO: 827. In one embodiment, the antibody molecule comprises a VH encoded by the nucleotide sequence of SEQ ID NO: 807 and a VL encoded by the nucleotide sequence of SEQ ID NO: 817. In one embodiment, the antibody molecule comprises a VH encoded by the nucleotide sequence of SEQ ID NO: 823 and a VL encoded by the nucleotide sequence of SEQ ID NO: 827.

[1065] In one embodiment, the anti-TIM-3 antibody molecule comprises a heavy chain comprising the amino acid sequence of SEQ ID NO: 808, or an amino acid sequence at least 85%, 90%, 95%, or 99% identical or higher to SEQ ID NO: 808. In one embodiment, the anti-TIM-3 antibody molecule comprises a light chain comprising the amino acid sequence of SEQ ID NO: 818, or an amino acid sequence at least 85%, 90%, 95%, or 99% identical or higher to SEQ ID NO: 818. In one embodiment, the anti-TIM-3 antibody molecule comprises a heavy chain comprising the amino acid sequence of SEQ ID NO: 824, or an amino acid sequence at least 85%, 90%, 95%, or 99% identical or higher to SEQ ID NO: 824. In one embodiment, the anti-TIM-3 antibody molecule comprises a light chain comprising the amino acid sequence of SEQ ID NO: 828, or an amino acid sequence at least 85%, 90%, 95%, or 99% identical or higher to SEQ ID NO: 828. In one embodiment, the anti-TIM-3 antibody molecule comprises a heavy chain comprising the amino acid sequence of SEQ ID NO: 808 and a light chain comprising the amino acid sequence of SEQ ID NO: 818. In one embodiment, the anti-TIM-3 antibody molecule comprises a heavy chain comprising the amino acid sequence of SEQ ID NO: 824 and a light chain comprising the amino acid sequence of SEQ ID NO: 828.

[1066] In one embodiment, the antibody molecule comprises a heavy chain encoded by the nucleotide sequence of SEQ ID NO: 809, or a nucleotide sequence at least 85%, 90%, 95%, or 99% identical or higher to SEQ ID NO: 809. In one embodiment, the antibody molecule comprises a light chain encoded by the nucleotide sequence of SEQ ID NO: 819, or a nucleotide sequence at least 85%, 90%, 95%, or 99% identical or higher to SEQ ID NO: 819. In one embodiment, the antibody molecule comprises a heavy chain encoded by the nucleotide sequence of SEQ ID NO: 825, or a nucleotide sequence at least 85%, 90%, 95%, or 99% identical or higher to SEQ ID NO: 825. In one embodiment, the antibody molecule comprises a light chain encoded by the nucleotide sequence of SEQ ID NO: 829, or a nucleotide sequence at least 85%, 90%, 95%, or 99% identical or higher to SEQ ID NO: 829. In one embodiment, the antibody molecule comprises a heavy chain encoded by the nucleotide sequence of SEQ ID NO: 809 and a light chain encoded by the nucleotide sequence of SEQ ID NO: 819. In one embodiment, the antibody molecule comprises a heavy chain encoded by the nucleotide sequence of SEQ ID NO: 825 and a light chain encoded by the nucleotide sequence of SEQ ID NO: 829.

[1067] The antibody molecules described herein can be made by vectors, host cells, and methods described in US 2015/0218274, incorporated by reference in its entirety.

TABLE 24
Amino acid and nucleotide sequences of
exemplary anti-TIM-3 antibody molecules

| | |
|---|---|
| ABTIM3-hum11 | |
| SEQ ID NO: 801 (Kabat) | HCDR1 |
| SEQ ID NO: 802 (Kabat) | HCDR2 |
| SEQ ID NO: 803 (Kabat) | HCDR3 |
| SEQ ID NO: 804 (Chothia) | HCDR1 |
| SEQ ID NO: 805 (Chothia) | HCDR2 |
| SEQ ID NO: 803 (Chothia) | HCDR3 |
| SEQ ID NO: 806 | VH |
| SEQ ID NO: 807 | DNA VH |
| SEQ ID NO: 808 | Heavy chain |
| SEQ ID NO: 809 | DNA heavy chain |
| SEQ ID NO: 810 (Kabat) | LCDR1 |
| SEQ ID NO: 811 (Kabat) | LCDR2 |
| SEQ ID NO: 812 (Kabat) | LCDR3 |
| SEQ ID NO: 813 (Chothia) | LCDR1 |
| SEQ ID NO: 814 (Chothia) | LCDR2 |
| SEQ ID NO: 815 (Chothia) | LCDR3 |
| SEQ ID NO: 816 | VL |
| SEQ ID NO: 817 | DNA VL |
| SEQ ID NO: 818 | Light chain |
| SEQ ID NO: 819 | DNA light chain |
| ABTIM3-hum03 | |
| SEQ ID NO: 801 (Kabat) | HCDR1 |
| SEQ ID NO: 820 (Kabat) | HCDR2 |
| SEQ ID NO: 803 (Kabat) | HCDR3 |
| SEQ ID NO: 804 (Chothia) | HCDR1 |
| SEQ ID NO: 821 (Chothia) | HCDR2 |
| SEQ ID NO: 803 (Chothia) | HCDR3 |
| SEQ ID NO: 822 | VH |
| SEQ ID NO: 823 | DNA VH |
| SEQ ID NO: 824 | Heavy chain |
| SEQ ID NO: 825 | DNA heavy chain |
| SEQ ID NO: 810 (Kabat) | LCDR1 |
| SEQ ID NO: 811 (Kabat) | LCDR2 |
| SEQ ID NO: 812 (Kabat) | LCDR3 |
| SEQ ID NO: 813 (Chothia) | LCDR1 |
| SEQ ID NO: 814 (Chothia) | LCDR2 |
| SEQ ID NO: 815 (Chothia) | LCDR3 |
| SEQ ID NO: 826 | VL |
| SEQ ID NO: 827 | DNA VL |
| SEQ ID NO: 828 | Light chain |
| SEQ ID NO: 829 | DNA light chain |

### Other Exemplary TIM-3 Inhibitors

[1068] In one embodiment, the anti-TIM-3 antibody molecule is TSR-022 (AnaptysBio/Tesaro). In one embodiment, the anti-TIM-3 antibody molecule comprises one or more of the CDR sequences (or collectively all of the CDR sequences), the heavy chain or light chain variable region sequence, or the heavy chain or light chain sequence of TSR-022. In one embodiment, the anti-TIM-3 antibody molecule comprises one or more of the CDR sequences (or collectively all of the CDR sequences), the heavy chain or light chain variable region sequence, or the heavy chain or light chain sequence of APE5137 or APE5121, e.g., as disclosed in Table 25. APE5137, APE5121, and other anti-TIM-3 antibodies are disclosed in WO 2016/161270, incorporated by reference in its entirety.

[1069] In one embodiment, the anti-TIM-3 antibody molecule is the antibody clone F38-2E2. In one embodiment, the anti-TIM-3 antibody molecule comprises one or more of the CDR sequences (or collectively all of the CDR sequences), the heavy chain or light chain variable region sequence, or the heavy chain or light chain sequence of F38-2E2.

[1070] Further known anti-TIM-3 antibodies include those described, e.g., in WO 2016/111947, WO 2016/071448, WO 2016/144803, U.S. Pat. Nos. 8,552,156, 8,841,418, and 9,163,087, incorporated by reference in their entirety.

[1071] In one embodiment, the anti-TIM-3 antibody is an antibody that competes for binding with, and/or binds to the same epitope on TIM-3 as, one of the anti-TIM-3 antibodies described herein.

TABLE 25
Amino acid sequences of other exemplary
anti-TIM-3 antibody molecules

| | |
|---|---|
| APE5137 | |
| SEQ ID NO: 830 | VH |
| SEQ ID NO: 831 | VL |
| APE5121 | |
| SEQ ID NO: 832 | VH |
| SEQ ID NO: 833 | VL |

### TGF-β Inhibitors

[1072] In certain embodiments, the BCMA CAR-expressing cell therapy is administered in combination with a transforming growth factor beta (also known as TGF-β, TGFβ, TGFb, or TGF-beta, used interchangeably herein) inhibitor.

[1073] TGF-β belongs to a large family of structurally-related cytokines including, e.g., bone morphogenetic proteins (BMPs), growth and differentiation factors, activins and inhibins. In some embodiments, the TGF-β inhibitors described herein can bind and/or inhibit one or more isoforms of TGF-β (e.g., one, two, or all of TGF-β1, TGF-β2, or TGF-β3).

[1074] In some embodiments, the TGF-β inhibitor comprises XOMA 089, or a compound disclosed in International Application Publication No. WO 2012/167143, which is incorporated by reference in its entirety.

[1075] XOMA 089 is also known as XPA.42.089. XOMA 089 is a fully human monoclonal antibody that specifically binds and neutralizes TGF-beta 1 and 2 ligands.

[1076] The heavy chain variable region of XOMA 089 has the amino acid sequence of:

(SEQ ID NO: 1986)
QVQLVQSGAEVKKPGSSVKVSCKASGGTFSSYAISWVRQAPGQGLEWMG
GIIPIFGTANYAQKFQGRVTITADESTSTAYMELSSLRSEDTAVYYCAR
GLWEVRALPSVYWGQGTLVTVSS (disclosed as SEQ ID
NO: 6 in WO 2012/167143).

The light chain variable region of XOMA 089 has the amino acid sequence of:

(SEQ ID NO: 1987)
SYELTQPPSVSVAPGQTARITCGANDIGSKSVHWYQQKAGQAPVLVVSED
IIRPSGIPERISGSNSGNTATLTISRVEAGDEADYYCQVWDRDSDQYVFG
TGTKVTVLG (disclosed as SEQ ID NO: 8 in WO 2012/
167143).

[1077] XOMA 089 binds with high affinity to the human TGF-β isoforms. Generally, XOMA 089 binds with high affinity to TGF-β1 and TGF-β2, and to a lesser extent to TGF-β3. In Biacore assays, the K_{D} of XOMA 089 on human TGF-β is 14.6 pM for TGF-β1, 67.3 pM for TGF-β2, and 948 pM for TGF-β3. Given the high affinity binding to all three TGF-β isoforms, in certain embodiments, XOMA 089 is expected to bind to TGF-β1, 2 and 3 at a dose of XOMA 089 as described herein. XOMA 089 cross-reacts with rodent and cynomolgus monkey TGF-β and shows functional activity in vitro and in vivo, making rodent and cynomolgus monkey relevant species for toxicology studies.

[1078] In some embodiments, the TGF-β inhibitor comprises fresolimumab (CAS Registry Number: 948564-73-6). Fresolimumab is also known as GC1008. Fresolimumab is a human monoclonal antibody that binds to and inhibits TGF-beta isoforms 1, 2 and 3.

[1079] The heavy chain of fresolimumab has the amino acid sequence of:

(SEQ ID NO: 1988)
QVQLVQSGAEVKKPGSSVKVSCKASGYTFSSNVISWVRQAPGQGLEWMG
GVIPIVDIANYAQRFKGRVTITADESTSTTYMELSSLRSEDTAVYYCAS
TLGLVLDAMDYWGQGTLVTVSSASTKGPSVFPLAPCSRSTSESTAALGC
LVKDYFPEPVTVSWNSGALTSGVHTFPAVLQSSGLYSLSSVVTVPSSSL
GTKTYTCNVDHKPSNTKVDKRVESKYGPPCPSCPAPEFLGGPSVFLFPP
KPKDTLMISRTPEVTCVVVDVSQEDPEVQFNWYVDGVEVHNAKTKPREE
QFNSTYRVVSVLTVLHQDWLNGKEYKCKVSNKGLPSSIEKTISKAKGQP
REPQVYTLPPSQEEMTKNQVSLTCLVKGFYPSDIAVEWESNGQPENNYK
TTPPVLDSDGSFFLYSRLTVDKSRWQEGNVFSCSVMHEALHNHYTQKSL
SLSLGK.

[1080] The light chain of fresolimumab has the amino acid sequence of:

(SEQ ID NO: 1989)
ETVLTQSPGTLSLSPGERATLSCRASQSLGSSYLAWYQQKPGQAPRLLI
YGASSRAPGIPDRFSGSGSGTDFTLTISRLEPEDFAVYYCQQYADSPIT
FGQGTRLEIKRTVAAPSVFIFPPSDEQLKSGTASVVCLLNNFYPREAKV
QWKVDNALQSGNSQESVTEQDSKDSTYSLSSTLTLSKADYEKHKVYACE
VTHQGLSSPVTKSFNRGEC.

[1081] Fresolimumab is disclosed, e.g., in International Application Publication No. WO 2006/086469, and U.S. Pat. Nos. 8,383,780 and 8,591,901, which are incorporated by reference in their entirety.

### Anti-CD73 Antibody Molecules

[1082] In some embodiments, the BCMA CAR-expressing cell therapy is administered in combination with an anti-CD73 antibody molecule. In one embodiment, an anti-CD73 antibody molecule is a full antibody molecule or an antigen-binding fragment thereof. In some embodiments, the anti-CD73 antibody molecule is chosen from any of the antibody molecules listed in Table 26. In other embodiments, the anti-CD73 antibody molecule comprises a heavy chain variable domain sequence, a light chain variable domain sequence, or both, as disclosed in Table 26. In certain embodiments, the anti-CD73 antibody molecule binds to a CD73 protein and reduces, e.g., inhibits or antagonizes, an activity of CD73, e.g., human CD73.

[1083] In one embodiment, the anti-CD73 antibody molecule is an anti-CD73 antibody disclosed in WO2016/075099, herein incorporated by reference in its entirety. In one embodiment, the anti-CD73 antibody molecule is MEDI 9447, e.g., as disclosed in WO2016/075099. Alternative names for MEDI 9447 include clone 10.3 or 73combo3. MEDI 9447 is an IgG1 antibody that inhibits, e.g., antagonizes, an activity of CD73. MEDI 9447 and other anti-CD73 antibody molecules are also disclosed in WO2016/075176 and US2016/0129108, the entire contents of which are herein incorporated by reference in their entirety.

[1084] In one embodiment, the anti-CD73 antibody molecule comprises a heavy chain variable domain, a light chain variable domain, or both, of MEDI 9477. The amino acid sequence of the heavy chain variable domain of MEDI 9477 is disclosed as SEQ ID NO: 1990 (see Table 26). The amino acid sequence of the light chain variable domain of MEDI 9477 is disclosed as SEQ ID NO: 1991 (see Table 26).

[1085] In one embodiment, the anti-CD73 antibody molecule is an anti-CD73 antibody disclosed in WO2016/081748, herein incorporated by reference in its entirety. In one embodiment, the anti-CD73 antibody molecule is 11F11, e.g., as disclosed in WO2016/081748. 11F11 is an IgG2 antibody that inhibits, e.g., antagonizes, an activity of CD73. Antibodies derived from 11F11, e.g., CD73.4, and CD73.10; clones of 11F11, e.g., 11F11-1 and 11F11-2; and other anti-CD73 antibody molecules are disclosed in WO2016/081748 and U.S. Pat. No. 9,605,080, the entire contents of which are herein incorporated by reference in their entirety.

[1086] In one embodiment, the anti-CD73 antibody molecule comprises a heavy chain variable domain, a light chain variable domain, or both, of 11F11-1 or 11F11-2. The amino acid sequence of the heavy chain variable domain of 11F11-1 is disclosed as SEQ ID NO: 1998 (see Table 26). The amino acid sequence of the light chain variable domain of 11F11-1 is disclosed as SEQ ID NO: 1999 (see Table 26). The amino acid sequence of the heavy chain variable domain of 11F11-2 is disclosed as SEQ ID NO: 1994 (see Table 26). The amino acid sequence of the light chain variable domain of 11F11-2 is disclosed as SEQ ID NO: 1995 (see Table 26). In one embodiment, the anti-CD73 antibody molecule comprises a heavy chain, a light chain, or both, of 11F11-1 or 11F11-2. The heavy and light chain amino acid sequences of 11F11-1 are disclosed as SEQ ID NO: 1996 and SEQ ID NO:1997, respectively (see Table 26). The heavy and light chain amino acid sequences of 11F11-2 are disclosed as SEQ ID NO: 1992 and SEQ ID NO:1993, respectively (see Table 26).

[1087] In one embodiment, the anti-CD73 antibody molecule is an anti-CD73 antibody disclosed in e.g., U.S. Pat. No. 9,605,080, herein incorporated by reference in its entirety.

[1088] In one embodiment, the anti-CD73 antibody molecule is CD73.4, e.g., as disclosed in U.S. Pat. No. 9,605,080. In one embodiment, the anti-CD73 antibody molecule comprises a heavy chain variable domain, a light chain variable domain, or both, of CD73.4. The amino acid sequence of the heavy chain variable domain of CD73.4 is disclosed as SEQ ID NO: 2000 (see Table 26). The amino acid sequence of the light chain variable domain of 11F11-2 is disclosed as SEQ ID NO: 2001 (see Table 26).

[1089] In one embodiment, the anti-CD73 antibody molecule is CD73.10, e.g., as disclosed in U.S. Pat. No. 9,605,080. In one embodiment, the anti-CD73 antibody molecule comprises a heavy chain variable domain, a light chain variable domain, or both, of CD73.10. The amino acid sequence of the heavy chain variable domain of CD73.10 is disclosed as SEQ ID NO: 2002 (see Table 26). The amino acid sequence of the light chain variable domain of 11F11-2 is disclosed as SEQ ID NO: 2003 (see Table 26).

[1090] In one embodiment, the anti-CD73 antibody molecule is an anti-CD73 antibody disclosed in WO2009/0203538, herein incorporated by reference in its entirety. In one embodiment, the anti-CD73 antibody molecule is 067-213, e.g., as disclosed in WO2009/0203538.

[1091] In one embodiment, the anti-CD73 antibody molecule comprises a heavy chain variable domain, a light chain variable domain, or both, of 067-213. The amino acid sequence of the heavy chain variable domain of 067-213 is disclosed as SEQ ID NO: 2004 (see Table 26). The amino acid sequence of the light chain variable domain of 067-213 is disclosed as SEQ ID NO: 2005 (see Table 26).

[1092] In one embodiment, the anti-CD73 antibody molecule is an anti-CD73 antibody disclosed in U.S. Pat. No. 9,090,697, herein incorporated by reference in its entirety. In one embodiment, the anti-CD73 antibody molecule is TY/23, e.g., as disclosed in U.S. Pat. No. 9,090,697. In one embodiment, the anti-CD73 antibody molecule comprises a heavy chain variable domain, a light chain variable domain, or both, of TY/23.

[1093] In one embodiment, the anti-CD73 antibody molecule is an anti-CD73 antibody disclosed in WO2016/055609, herein incorporated by reference in its entirety. In one embodiment, the anti-CD73 antibody molecule comprises a heavy chain variable domain, a light chain variable domain, or both, of an anti-CD73 antibody disclosed in WO2016/055609.

[1094] In one embodiment, the anti-CD73 antibody molecule is an anti-CD73 antibody disclosed in WO2016/146818, herein incorporated by reference in its entirety. In one embodiment, the anti-CD73 antibody molecule comprises a heavy chain variable domain, a light chain variable domain, or both, of an anti-CD73 antibody disclosed in WO2016/146818.

[1095] In one embodiment, the anti-CD73 antibody molecule is an anti-CD73 antibody disclosed in WO2004/079013, herein incorporated by reference in its entirety. In one embodiment, the anti-CD73 antibody molecule comprises a heavy chain variable domain, a light chain variable domain, or both, of an anti-CD73 antibody disclosed in WO2004/079013.

[1096] In one embodiment, the anti-CD73 antibody molecule is an anti-CD73 antibody disclosed in WO2012/125850, herein incorporated by reference in its entirety. In one embodiment, the anti-CD73 antibody molecule comprises a heavy chain variable domain, a light chain variable domain, or both, of an anti-CD73 antibody disclosed in WO2012/125850.

[1097] In one embodiment, the anti-CD73 antibody molecule is an anti-CD73 antibody disclosed in WO2015/004400, herein incorporated by reference in its entirety. In one embodiment, the anti-CD73 antibody molecule comprises a heavy chain variable domain, a light chain variable domain, or both, of an anti-CD73 antibody disclosed in WO2015/004400.

[1098] In one embodiment, the anti-CD73 antibody molecule is an anti-CD73 antibody disclosed in WO2007/146968, herein incorporated by reference in its entirety. In one embodiment, the anti-CD73 antibody molecule comprises a heavy chain variable domain, a light chain variable domain, or both, of an anti-CD73 antibody disclosed in WO2007146968.

[1099] In one embodiment, the anti-CD73 antibody molecule is an anti-CD73 antibody disclosed in US2007/0042392, herein incorporated by reference in its entirety. In one embodiment, the anti-CD73 antibody molecule comprises a heavy chain variable domain, a light chain variable domain, or both, of an anti-CD73 antibody disclosed in US2007/0042392.

[1100] In one embodiment, the anti-CD73 antibody molecule is an anti-CD73 antibody disclosed in US2009/0138977, herein incorporated by reference in its entirety. In one embodiment, the anti-CD73 antibody molecule comprises a heavy chain variable domain, a light chain variable domain, or both, of an anti-CD73 antibody disclosed in US2009/0138977.

[1101] In one embodiment, the anti-CD73 antibody molecule is an anti-CD73 antibody disclosed in Flocke et al., Eur J Cell Biol. 1992 June; 58(1):62-70, herein incorporated by reference in its entirety. In one embodiment, the anti-CD73 antibody molecule comprises a heavy chain variable domain, a light chain variable domain, or both, of an anti-CD73 antibody disclosed in Flocke et al., Eur J Cell Biol. 1992 June; 58(1):62-70.

[1102] In one embodiment, the anti-CD73 antibody molecule is an anti-CD73 antibody disclosed in Stagg et al., PNAS. 2010 Jan. 107(4): 1547-1552, herein incorporated by reference in its entirety. In some embodiments, the anti-CD73 antibody molecule is TY/23 or TY11.8, as disclosed in Stagg et al. In one embodiment, the anti-CD73 antibody molecule comprises a heavy chain variable domain, a light chain variable domain, or both, of an anti-CD73 antibody disclosed in Stagg et al.

TABLE 26
Sequences of exemplary anti-CD73 antibody molecules

| | |
|---|---|
| W0201/6075099 | |
| MEDI 9447 | |
| SEQ ID NO: 1990 | VH |
| SEQ ID NO: 1991 | VL |
| WO2016/081748 | |
| 11F11-2 | |
| SEQ ID NO: 1992 | HC |
| SEQ ID NO: 1993 | LC |
| SEQ ID NO: 1994 | VH |
| SEQ ID NO: 1995 | VL kappa |
| WO2016/081748 | |
| 11F11-1 | |
| SEQ ID NO: 1996 | HC |
| SEQ ID NO: 1997 | LC |
| SEQ ID NO: 1998 | VH |
| SEQ ID NO: 1999 | VL kappa |
| U.S. Pat. No. 9,605,080 | |
| CD73.4 | |
| SEQ ID NO: 2000 | VH |
| SEQ ID NO: 2001 | VL kappa |
| U.S. Pat. No. 9,605,080 | |
| CD73.10 | |
| SEQ ID NO: 2002 | VH |
| SEQ ID NO: 2003 | VL kappa |
| U.S. Pat. No. 9,388,249 | |
| 067-213 | |
| SEQ ID NO: 2004 | VH |
| SEQ ID NO: 2005 | VL |

[1103] The anti-CD73 antibody molecules used in the combination therapies disclosed herein can include any of the VH/VL sequences disclosed in Table 26, or an amino acid sequence substantially identical thereto (e.g., at least 80%, 85%, 90%, 95%, 99% or more identical thereto). Exemplary sequences for CD73 antibodies include:

[1104] (i) the VH and VL amino acid sequences for MEDI 9447, SEQ ID NOs: 1990-1991, respectively, or an amino acid sequence substantially identical thereto (e.g., at least 80%, 85%, 90%, 95%, 99% or more identical to SEQ ID NOs: 1990-1991);

[1105] (ii) the HC and LC amino acid sequences for 11F11-2, SEQ ID NOs: 1992-1993, respectively, or an amino acid sequence substantially identical thereto (e.g., at least 80%, 85%, 90%, 95%, 99% or more identical to SEQ ID NOs: 1992-1993);

[1106] (iii) the VH and VL amino acid sequences for 11F11-2, SEQ ID NOs: 1994-1995, respectively, or an amino acid sequence substantially identical thereto (e.g., at least 80%, 85%, 90%, 95%, 99% or more identical to SEQ ID NOs: 1994-1995);

[1107] (iv) the HC and LC amino acid sequences for 11F11-1, SEQ ID NOs: 1996 and 1997, respectively, or an amino acid sequence substantially identical thereto (e.g., at least 80%, 85%, 90%, 95%, 99% or more identical to SEQ ID NOs: 1996 and 1997);

[1108] (v) the VH and VL amino acid sequences for 11F11-1, SEQ ID NOs: 1998-1999, respectively, or an amino acid sequence substantially identical thereto (e.g., at least 80%, 85%, 90%, 95%, 99% or more identical to SEQ ID NOs: 1998-1999);

[1109] (vi) the VH and VL amino acid sequences for CD73.4, SEQ ID NOs: 2000-2001, respectively, or an amino acid sequence substantially identical thereto (e.g., at least 80%, 85%, 90%, 95%, 99% or more identical to SEQ ID NOs: 2000-2001);

[1110] (vii) the VH and VL amino acid sequences for CD73.10, SEQ ID NOs: 2002-2003, respectively, or an amino acid sequence substantially identical thereto (e.g., at least 80%, 85%, 90%, 95%, 99% or more identical to SEQ ID NOs: 2002-2003); or

[1111] (viii) the VH and VL amino acid sequences for 067-213, SEQ ID NOs: 2004-2005, respectively, or an amino acid sequence substantially identical thereto (e.g., at least 80%, 85%, 90%, 95%, 99% or more identical to SEQ ID NOs: 2004-2005).

### IL-17 Inhibitor

[1112] In some embodiments, the BCMA CAR-expressing cell therapy is administered in combination with an interleukine-17 (IL-17) inhibitor.

[1113] In some embodiments, the IL-17 inhibitor is secukinumab (CAS Registry Numbers: 875356-43-7 (heavy chain) and 875356-44-8 (light chain)). Secukinumab is also known as AIN457 and COSENTYX®. Secukinumab is a recombinant human monoclonal IgG1/κ antibody that binds specifically to IL-17A. It is expressed in a recombinant Chinese Hamster Ovary (CHO) cell line.

[1114] Secukinumab is described, e.g., in WO 2006/013107, U.S. Pat. Nos. 7,807,155, 8,119,131, 8,617,552, and EP 1776142. The heavy chain variable region of secukinumab has the amino acid sequence of:

(SEQ ID NO: 2006)
EVQLVESGGGLVQPGGSLRLSCAASGFTFSNYWMNWVRQAPGKGLEWVA
AINQDGSEKYYVGSVKGRFTISRDNAKNSLYLQMNSLRVEDTAVYYCVR
DYYDILTDYYIHYWYFDLWGRGTLVTVSS (disclosed as SEQ
ID NO: 8 in WO 2006/013107).

The light chain variable region of secukinumab has the amino acid sequence of:

(SEQ ID NO: 2007)
EIVLTQSPGTLSLSPGERATLSCRASQSVSSSYLAWYQQKPGQAPRLLI
YGASSRATGIPDRFSGSGSGTDFTLTISRLEPEDFAVYYCQQYGSSPCT
FGQGTRLEIKR (disclosed as SEQ ID NO: 10 in
WO 2006/013107).

The heavy chain CDR1 of secukinumab has the amino acid sequence of NYWMN (SEQ ID NO: 2008) (disclosed as SEQ ID NO: 1 in WO 2006/013107). The heavy chain CDR2 of secukinumab has the amino acid sequence of AINQDGSEKYYVGSVKG (SEQ ID NO: 2009) (disclosed as SEQ ID NO: 2 in WO 2006/013107). The heavy chain CDR3 of secukinumab has the amino acid sequence of DYYDILTDYYIHYWYFDL (SEQ ID NO: 2010) (disclosed as SEQ ID NO: 3 in WO 2006/013107). The light chain CDR1 of secukinumab has the amino acid sequence of RASQSVSSSYLA (SEQ ID NO: 2011) (disclosed as SEQ ID NO: 4 in WO 2006/013107). The light chain CDR2 of secukinumab has the amino acid sequence of GASSRAT (SEQ ID NO: 2012) (disclosed as SEQ ID NO: 5 in WO 2006/013107). The light chain CDR3 of secukinumab has the amino acid sequence of GASSRAT (SEQ ID NO: 2013) (disclosed as SEQ ID NO: 6 in WO 2006/013107).

[1115] In some embodiments, the IL-17 inhibitor is CJM112. CJM112 is also known as XAB4. CJM112 is a fully human monoclonal antibody (e.g., of the IgG1/κ isotype) that targets IL-17A.

[1116] CJM112 is disclosed, e.g., in WO 2014/122613. The heavy chain of CJM112 has the amino acid sequence of:

(SEQ ID NO: 2014)
EVQLVESGGDLVQPGGSLRLSCAASGFTFSSYWMSWVRQAPGKGLEWVA
NIKQDGSEKYYVDSVKGRFTISRDNAKNSLYLQMNSLRAEDTAVYYCAR
DRGSLYYWGQGTLVTVSSASTKGPSVFPLAPSSKSTSGGTAALGCLVKD
YFPEPVTVSWNSGALTSGVHTFPAVLQSSGLYSLSSVVTVPSSSLGTQT
YICNVNHKPSNTKVDKRVEPKSCDKTHTCPPCPAPELLGGPSVFLFPPK
PKDTLMISRTPEVTCVVVDVSHEDPEVKFNWYVDGVEVHNAKTKPREEQ
YNSTYRVVSVLTVLHQDWLNGKEYKCKVSNKALPAPIEKTISKAKGQPR
EPQVYTLPPSREEMTKNQVSLTCLVKGFYPSDIAVEWESNGQPENNYKT
TPPVLDSDGSFFLYSKLTVDKSRWQQGNVFSCSVMHEALHNHYTQKSLS
LSPGK (disclosed as SEQ ID NO: 14 in WO 2014/
122613).

The light chain of CJM112 has the amino acid sequence of:

(SEQ ID NO: 2015)
AIQLTQSPSSLSASVGDRVTITCRPSQGINWELAWYQQKPGKAPKLLIY
DASSLEQGVPSRFSGSGSGTDFTLTISSLQPEDFATYYCQQFNSYPLTF
GGGTKVEIKRTVAAPSVFIFPPSDEQLKSGTASVVCLLNNFYPREAKVQ
WKVDNALQSGNSQESVTEQDSKDSTYSLSSTLTLSKADYEKHKVYACEV
THQGLSSPVTKSFNRGEC (disclosed as SEQ ID NO: 44
in WO 2014/122613).

[1117] CJM112 can bind to human, cynomolgus, mouse and rat IL-17A and neutralize the bioactivity of these cytokines in vitro and in vivo. IL-17A, a member of the IL-17 family, is a major proinflammatory cytokine that has been indicated to play important roles in many immune mediated conditions, such as psoriasis and cancers (Witowski et al. (2004) Cell Mol. Life Sci. p. 567-79; Miossec and Kolls (2012) Nat. Rev. Drug Discov. p. 763-76).

[1118] In some embodiments, the IL-17 inhibitor is ixekizumab (CAS Registry Number: 1143503-69-8). Ixekizumab is also known as LY2439821. Ixekizumab is a humanized IgG4 monoclonal antibody that targets IL-17A.

[1119] Ixekizumab is described, e.g., in WO 2007/070750, U.S. Pat. Nos. 7,838,638, and 8,110,191. The heavy chain variable region of ixekizumab has the amino acid sequence of:

(SEQ ID NO: 2016)
QVQLVQSGAEVKKPGSSVKVSCKASGYSFTDYHIHWVRQAPGQGLEWMG
VINPMYGTTDYNQRFKGRVTITADESTSTAYMELSSLRSEDTAVYYCAR
YDYFTGTGVYWGQGTLVTVSS (disclosed as SEQ ID NO:
118 in WO 2007/070750).

The light chain variable region of ixekizumab has the amino acid sequence of:

(SEQ ID NO: 2017)
DIVMTQTPLSLSVTPGQPASISCRSSRSLVHSRGNTYLHWYLQKPGQSP
QLLIYKVSNRFIGVPDRFSGSGSGTDFTLKISRVEAEDVGVYYCSQSTH
LPFTFGQGTKLEIK (disclosed as SEQ ID NO: 241 in
WO 2007/070750).

[1120] In some embodiments, the IL-17 inhibitor is brodalumab (CAS Registry Number: 1174395-19-7). Brodalumab is also known as AMG 827 or AM-14. Brodalumab binds to the interleukin-17 receptor A (IL-17RA) and prevents IL-17 from activating the receptor.

[1121] Brodalumab is disclosed, e.g., in WO 2008/054603, U.S. Pat. Nos. 7,767,206, 7,786,284, 7,833,527, 7,939,070, 8,435,518, 8,545,842, 8,790,648, and 9,073,999. The heavy chain CDR1 of brodalumab has the amino acid sequence of RYGIS (SEQ ID NO: 2018) (as disclosed as SEQ ID NO: 146 in WO 2008/054603). The heavy chain CDR2 of brodalumab has the amino acid sequence of WISTYSGNTNYAQKLQG (SEQ ID NO: 2019) (as disclosed as SEQ ID NO: 147 in WO 2008/054603). The heavy chain CDR3 of brodalumab has the amino acid sequence of RQLYFDY (SEQ ID NO: 2020) (as disclosed as SEQ ID NO: 148 in WO 2008/054603). The light chain CDR1 of brodalumab has the amino acid sequence of RASQSVSSNLA (SEQ ID NO: 2021) (as disclosed as SEQ ID NO: 224 in WO 2008/054603). The heavy chain CDR2 of brodalumab has the amino acid sequence of DASTRAT (SEQ ID NO: 2022) (as disclosed as SEQ ID NO: 225 in WO 2008/054603). The heavy chain CDR3 of brodalumab has the amino acid sequence of QQYDNWPLT (SEQ ID NO: 2023) (as disclosed as SEQ ID NO: 226 in WO 2008/054603).

### IL-1β Inhibitor

[1122] In some embodiments, the BCMA CAR-expressing cell therapy is administered in combination with an interleukine-1 beta (IL-113) inhibitor.

[1123] The Interleukin-1 (IL-1) family of cytokines is a group of secreted pleotropic cytokines with a central role in inflammation and immune response. Increases in IL-1 are observed in multiple clinical settings including cancer (Apte et al. (2006) Cancer Metastasis Rev. p. 387-408; Dinarello (2010) Eur. J. Immunol. p. 599-606). The IL-1 family comprises, inter alia, IL-1 beta (IL-1β), and IL-1alpha (IL-1a). IL-1β is elevated in lung, breast and colorectal cancer (Voronov et al. (2014) Front Physiol. p. 114) and is associated with poor prognosis (Apte et al. (2000) Adv. Exp. Med. Biol. p. 277-88). Without wishing to be bound by theory, it is believed that in some embodiments, secreted IL-1β, derived from the tumor microenvironment and by malignant cells, promotes tumor cell proliferation, increases invasiveness and dampens anti-tumor immune response, in part by recruiting inhibitory neutrophils (Apte et al. (2006) Cancer Metastasis Rev. p. 387-408; Miller et al. (2007) J. Immunol. p. 6933-42). Experimental data indicate that inhibition of IL-1β results in a decrease in tumor burden and metastasis (Voronov et al. (2003) Proc. Natl. Acad. Sci. U.S.A. p. 2645-50).

[1124] In some embodiments, the IL-1β inhibitor is chosen from Anakinra or Rilonacept.

[1125] In some embodiments, the IL-1β inhibitor is Anakinra (Amgen), also known as Kineret. Anakinra is an IL-1Ra antagonist that competes with IL-1β for binding to the cell surface receptor.

[1126] In some embodiments, the IL-1β inhibitor is Rilonacept (Regeneron), also known as Arcalyst. Rilonacept is a fusion protein consisting of the ligand-binding domains of the extracellular portions of the human interleukin-1 receptor component (IL-1R1) and IL-1 receptor accessory protein (IL-1RAcP) linked to the fragment-crystallizable portion (Fc region) of human IgG1. Rilonacept is an IL-1β inhibitor which, e.g., binds and neturalizes IL-1.

### CD32B Inhibitor

[1127] In some embodiments, the BCMA CAR-expressing cell therapy is administered in combination with CD32B inhibitor.

[1128] In some embodiments, the CD32B inhibitor is an anti-CD32B antibody molecule. Exemplary anti-CD32B antibody molecules are disclosed in U.S. Pat. Nos. 8,187,593, 8,778,339, 8,802,089, US20060073142, US20170198040, US20130251706, and WO2009083009, herein incorporated by reference in their entirety. In some embodiments, the anti-CD32B antibody molecule is an antibody molecule disclosed in US20170198040.

### Chemotherapeutic Agents

[1129] In some embodiments, the BCMA CAR-expressing cell therapy is administered in combination with a chemotherapeutic agent. Exemplary chemotherapeutic agents include an anthracycline (e.g., doxorubicin (e.g., liposomal doxorubicin)), a vinca alkaloid (e.g., vinblastine, vincristine, vindesine, vinorelbine), an alkylating agent (e.g., cyclophosphamide, decarbazine, melphalan, ifosfamide, temozolomide), an immune cell antibody (e.g., alemtuzamab, gemtuzumab, rituximab, tositumomab), an antimetabolite (including, e.g., folic acid antagonists, pyrimidine analogs, purine analogs and adenosine deaminase inhibitors (e.g., fludarabine)), an mTOR inhibitor, a TNFR glucocorticoid induced TNFR related protein (GITR) agonist, a proteasome inhibitor (e.g., aclacinomycin A, gliotoxin or bortezomib), an immunomodulator such as thalidomide or a thalidomide derivative (e.g., lenalidomide).

[1130] General Chemotherapeutic agents considered for use in combination therapies include anastrozole (Arimidex®), bicalutamide (Casodex®), bleomycin sulfate (Blenoxane®), busulfan (Myleran®), busulfan injection (Busulfex®), capecitabine (Xeloda®), N4-pentoxycarbonyl-5-deoxy-5-fluorocytidine, carboplatin (Paraplatin®), carmustine (BiCNU®), chlorambucil (Leukeran®), cisplatin (Platinol®), cladribine (Leustatin®), cyclophosphamide (Cytoxan® or Neosar®), cytarabine, cytosine arabinoside (Cytosar-U®), cytarabine liposome injection (DepoCyt®), dacarbazine (DTIC-Dome®), dactinomycin (Actinomycin D, Cosmegan), daunorubicin hydrochloride (Cerubidine®), daunorubicin citrate liposome injection (DaunoXome®), dexamethasone, docetaxel (Taxotere®), doxorubicin hydrochloride (Adriamycin®, Rubex®), etoposide (Vepesid®), fludarabine phosphate (Fludara®), 5-fluorouracil (Adrucil®, Efudex®), flutamide (Eulexin®), tezacitibine, Gemcitabine (difluorodeoxycitidine), hydroxyurea (Hydrea®), Idarubicin (Idamycin®), ifosfamide (IFEX®), irinotecan (Camptosar®), L-asparaginase (ELSPAR®), leucovorin calcium, melphalan (Alkeran®), 6-mercaptopurine (Purinethol®), methotrexate (Folex®), mitoxantrone (Novantrone®), mylotarg, paclitaxel (Taxol®), phoenix (Yttrium90/MX-DTPA), pentostatin, polifeprosan 20 with carmustine implant (Gliadel®), tamoxifen citrate (Nolvadex®), teniposide (Vumon®), 6-thioguanine, thiotepa, tirapazamine (Tirazone®), topotecan hydrochloride for injection (Hycamptin®), vinblastine (Velban®), vincristine (Oncovin®), and vinorelbine (Navelbine®).

[1131] Exemplary alkylating agents include, without limitation, nitrogen mustards, ethylenimine derivatives, alkyl sulfonates, nitrosoureas and triazenes): uracil mustard (Aminouracil Mustard®, Chlorethaminacil®, Demethyldopan®, Desmethyldopan®, Haemanthamine®, Nordopan®, Uracil nitrogen Mustard®, Uracillost®, Uracilmostaza®, Uramustin®, Uramustine®), chlormethine (Mustargen®), cyclophosphamide (Cytoxan®, Neosar®, Clafen®, Endoxan®, Procytox®, Revimmune™), ifosfamide (Mitoxana®), melphalan (Alkeran®), Chlorambucil (Leukeran®), pipobroman (Amedel®, Vercyte®), triethylenemelamine (Hemel®, Hexalen®, Hexastat®), triethylenethiophosphoramine, Temozolomide (Temodar®), thiotepa (Thioplex®), busulfan (Busilvex®, Myleran®), carmustine (BiCNU®), lomustine (CeeNU®), streptozocin (Zanosar®), and Dacarbazine (DTIC-Dome®). Additional exemplary alkylating agents include, without limitation, Oxaliplatin (Eloxatin®); Temozolomide (Temodar® and Temodal®); Dactinomycin (also known as actinomycin-D, Cosmegen®); Melphalan (also known as L-PAM, L-sarcolysin, and phenylalanine mustard, Alkeran®); Altretamine (also known as hexamethylmelamine (HMM), Hexalen®); Carmustine (BiCNU®); Bendamustine (Treanda®); Busulfan (Busulfex® and Myleran®); Carboplatin (Paraplatin®); Lomustine (also known as CCNU, CeeNU®); Cisplatin (also known as CDDP, Platinol® and Platinol®-AQ); Chlorambucil (Leukeran®); Cyclophosphamide (Cytoxan® and Neosar®); Dacarbazine (also known as DTIC, DIC and imidazole carboxamide, DTIC-Dome®); Altretamine (also known as hexamethylmelamine (HMM), Hexalen®); Ifosfamide (Ifex®); Prednumustine; Procarbazine (Matulane®); Mechlorethamine (also known as nitrogen mustard, mustine and mechloroethamine hydrochloride, Mustargen®); Streptozocin (Zanosar®); Thiotepa (also known as thiophosphoamide, TESPA and TSPA, Thioplex®); Cyclophosphamide (Endoxan®, Cytoxan®, Neosar®, Procytox®, Revimmune®); and Bendamustine HCl (Treanda®).

[1132] Exemplary mTOR inhibitors include, e.g., temsirolimus; ridaforolimus (formally known as deferolimus, (1R,2R,4S)-4-[(2R)-2[(1R,9S,12S,15R,16E,18R,19R,21R,23S,24E,26E,28Z,30S,32S,35R)-1,18-dihydroxy-19,30-dimethoxy-15,17,21,23,29,35-hexamethyl-2,3,10,14,20-pentaoxo-11,36-dioxa-4-azatricyclo[30.3.1.0^{4.9}]hexatriaconta-16,24,26,28-tetraen-12-yl]propyl]-2-methoxycyclohexyl dimethylphosphinate, also known as AP23573 and MK8669, and described in PCT Publication No. WO 03/064383); everolimus (Afinitor® or RAD001); rapamycin (AY22989, Sirolimus®); simapimod (CAS 164301-51-3); emsirolimus, (5-{2,4-Bis[(3S)-3-methylmorpholin-4-yl]pyrido[2,3-d]pyrimidin-7-yl}-2-methoxyphenyl)methanol (AZD8055); 2-Amino-8-[trans-4-(2-hydroxyethoxy)cyclohexyl]-6-(6-methoxy-3-pyridinyl)-4-methyl-pyrido[2,3-d]pyrimidin-7(8H)-one (PF04691502, CAS 1013101-36-4); and N²-[1,4-dioxo-4-[[4-(4-oxo-8-phenyl-4H-1-benzopyran-2-yl)morpholinium-4-yl]methoxy]butyl]-L-arginylglycyl-L-α-aspartylL-serine- (SEQ ID NO: 2035), inner salt (SF1126, CAS 936487-67-1), and XL765.

[1133] Exemplary immunomodulators include, e.g., afutuzumab (available from Roche®); pegfilgrastim (Neulasta®); lenalidomide (CC-5013, Revlimid®); thalidomide (Thalomid®), actimid (CC4047); and IRX-2 (mixture of human cytokines including interleukin 1, interleukin 2, and interferon γ, CAS 951209-71-5, available from IRX Therapeutics).

[1134] Exemplary anthracyclines include, e.g., doxorubicin (Adriamycin® and Rubex®); bleomycin (Lenoxane®); daunorubicin (dauorubicin hydrochloride, daunomycin, and rubidomycin hydrochloride, Cerubidine®); daunorubicin liposomal (daunorubicin citrate liposome, DaunoXome®); mitoxantrone (DHAD, Novantrone®); epirubicin (Ellence™); idarubicin (Idamycin®, Idamycin PFS®); mitomycin C (Mutamycin®); geldanamycin; herbimycin; ravidomycin; and desacetylravidomycin.

[1135] Exemplary vinca alkaloids include, e.g., vinorelbine tartrate (Navelbine®), Vincristine (Oncovin®), and Vindesine (Eldisine®)); vinblastine (also known as vinblastine sulfate, vincaleukoblastine and VLB, Alkaban-AQ® and Velban®); and vinorelbine (Navelbine®).

[1136] Exemplary proteosome inhibitors include bortezomib (Velcade®); carfilzomib (PX-171-007, (S)-4-Methyl-N-((S)-1-(((S)-4-methyl-1-((R)-2-methyloxiran-2-yl)-1-oxopentan-2-yl)amino)-1-oxo-3-phenylpropan-2-yl)-2-((S)-2-(2-morpholinoacetamido)-4-phenylbutanamido)-pentanamide); marizomib (NPI-0052); ixazomib citrate (MLN-9708); delanzomib (CEP-18770); and O-Methyl-N-[(2-methyl-5-thiazolyl)carbonyl]-L-seryl-O-methyl-N-[(1S)-2-[(2R)-2-methyl-2-oxiranyl]-2-oxo-1-(phenylmethyl)ethyl]-L-serinamide (ONX-0912).

### Additional Agents for Combination

TABLE 27
Selected therapeutic agents that can be administered in combination with the BCMA CAR-
expressing cell therapy, e.g., as a single agent or in combination with other agents described herein.
Each publication listed in this Table is herein incorporated by reference in its entirety, including all
structural formulae therein.

| | Generic | | Patents/Patent |
|---|---|---|---|
| Compound | Name | | Application |
| Designation | Tradename | Compound Structure | Publications |
| A1 | Sotrastaurin | [chemical structure] | EP 1682103 US 2007/142401 WO 2005/039549 |
| A2 | Nilotinib HCl monohydrate TASIGNA ® | [chemical structure] | WO 2004/005281 U.S. Pat. No. 7,169,791 |
| A7 | | [chemical structure] | WO 2009/141386 US 2010/0105667 |
| A8 | | [chemical structure] | WO 2010/029082 |
| A10 | | [chemical structure] | WO 2011/076786 |
| A11 | Deferasirox EXJADE ® | [chemical structure] | WO 1997/049395 |
| A12 | Letrozole FEMARA ® | [chemical structure] | U.S. Pat. No. 4,978,672 |
| A13 | | [chemical structure] | WO 2013/124826 US 2013/0225574 |
| A14 | | [chemical structure] | WO 2013/111105 |
| A15 | | [chemical structure] | WO 2007/121484 |
| A16 | Imatinib mesylate GLEEVEC ® | [chemical structure] | WO 1999/003854 |
| A17 | | [chemical structure] | EP 2099447 U.S. Pat. No. 7,767,675 U.S. Pat. No. 8,420,645 |
| A18 | Ruxolitinib Phosphate JAKAFI ® | [chemical structure] | WO 2007/070514 EP 2474545 U.S. Pat. No. 7,598,257 WO 2014/018632 |
| A19 | Panobinostat | [chemical structure] | WO 2014/072493 WO 2002/022577 EP 1870399 |
| A20 | Osilodrostat | [chemical structure] | WO 2007/024945 |
| A21 | | [chemical structure] | WO 2008/016893 EP 2051990 U.S. Pat. No. 8,546,336 |
| A23 | ceritinib ZYKADIA ™ | [chemical structure] | WO 2008/073687 U.S. Pat. No. 8,039,479 |
| A24 | | [chemical structure] | U.S. Pat. No. 8,415,355 U.S. Pat. No. 8,685,980 |
| A25 | | [chemical structure] | WO 2010/007120 |
| A26 | | Human monoclonal antibody to PRLR | U.S. Pat. No. 7,867,493 |
| A27 | | [chemical structure] | WO 2010/026124 EP 2344474 US 2010/0056576 WO2008/106692 |
| A28 | | [chemical structure] | WO 2010/101849 |
| A30 | | [chemical structure] | WO 2011/101409 |
| A31 | | Human monoclonal antibody to HER3 | WO 2012/022814 |
| | | | EP 2606070 |
| | | | U.S. Pat. No. 8,735,551 |
| A32 | | Antibody Drug Conjugate (ADC) | WO 2014/160160 |
| | | | Ab: 12425 (see |
| | | | Table 1, paragraph |
| | | | [00191]) |
| | | | Linker: SMCC (see |
| | | | paragraph [00117] |
| | | | Payload: DM1 (see |
| | | | paragraph [00111] |
| | | | See also Claim 29 |
| A33 | | Monoclonal antibody or Fab to M-CSF | WO 2004/045532 |
| A35 | Midostaurin | [chemical structure] | WO 2003/037347 EP 1441737 US 2012/252785 |
| A36 | Everolimus AFINITOR ® | [chemical structure] | WO 2014/085318 |
| A37 | | [chemical structure] | WO 2007/030377 U.S. Pat. No. 7,482,367 |
| A38 | Pasireotide diaspartate SIGNIFOR ® | [chemical structure] | WO 2002/010192 U.S. Pat. No. 7,473,761 |
| A40 | | [chemical structure] | WO 2013/184757 |
| A41 | | [chemical structure] | WO 2006/122806 |
| A42 | | [chemical structure] | WO 2008/073687 U.S. Pat. No. 8,372,858 |
| A43 | | [chemical structure] | WO 2010/002655 U.S. Pat. No. 8,519,129 |
| A44 | | [chemical structure] | WO 2010/002655 U.S. Pat. No. 8,519,129 |
| A45 | | [chemical structure] | WO 2010/002655 |
| A46 | Valspodar AMDRAY ™ | [chemical structure] | EP 296122 |
| A47 | Vatalanib succinate | [chemical structure] | WO 98/35958 |
| A48 | | IDH inhibitor | WO2014/141104 |
| A49 | | [chemical structure] | WO2013/171639 WO2013/171640 WO2013/171641 WO2013/171642 |
| A50 | | cRAF inhibitor | WO2014/151616 |
| A51 | | ERK1/2 ATP competitive inhibitor | WO2015/066188 |

### Biopolymer Delivery Methods

[1138] In some embodiments, one or more CAR-expressing cells as disclosed herein can be administered or delivered to the subject via a biopolymer scaffold, e.g., a biopolymer implant. Biopolymer scaffolds can support or enhance the delivery, expansion, and/or dispersion of the CAR-expressing cells described herein. A biopolymer scaffold comprises a biocompatible (e.g., does not substantially induce an inflammatory or immune response) and/or a biodegradable polymer that can be naturally occurring or synthetic.

[1139] Examples of suitable biopolymers include, but are not limited to, agar, agarose, alginate, alginate/calcium phosphate cement (CPC), beta-galactosidase (β-GAL), (1,2,3,4,6-pentaacetyl a-D-galactose), cellulose, chitin, chitosan, collagen, elastin, gelatin, hyaluronic acid collagen, hydroxyapatite, poly(3-hydroxybutyrate-co-3-hydroxy-hexanoate) (PHBHHx), poly(lactide), poly(caprolactone) (PCL), poly(lactide-co-glycolide) (PLG), polyethylene oxide (PEO), poly(lactic-co-glycolic acid) (PLGA), polypropylene oxide (PPO), polyvinyl alcohol) (PVA), silk, soy protein, and soy protein isolate, alone or in combination with any other polymer composition, in any concentration and in any ratio. The biopolymer can be augmented or modified with adhesion- or migration-promoting molecules, e.g., collagen-mimetic peptides that bind to the collagen receptor of lymphocytes, and/or stimulatory molecules to enhance the delivery, expansion, or function, e.g., anti-cancer activity, of the cells to be delivered. The biopolymer scaffold can be an injectable, e.g., a gel or a semi-solid, or a solid composition.

[1140] In some embodiments, CAR-expressing cells described herein are seeded onto the biopolymer scaffold prior to delivery to the subject. In embodiments, the biopolymer scaffold further comprises one or more additional therapeutic agents described herein (e.g., another CAR-expressing cell, an antibody, or a small molecule) or agents that enhance the activity of a CAR-expressing cell, e.g., incorporated or conjugated to the biopolymers of the scaffold. In embodiments, the biopolymer scaffold is injected, e.g., intratumorally, or surgically implanted at the tumor or within a proximity of the tumor sufficient to mediate an anti-tumor effect. Additional examples of biopolymer compositions and methods for their delivery are described in Stephan et al., Nature Biotechnology, 2015, 33:97-101; and WO2014/110591.

### Pharmaceutical Compositions and Treatments

[1141] Pharmaceutical compositions of the present invention may comprise a CAR-expressing cell, e.g., a plurality of CAR-expressing cells, as described herein, in combination with one or more pharmaceutically or physiologically acceptable carriers, diluents or excipients. Such compositions may comprise buffers such as neutral buffered saline, phosphate buffered saline and the like; carbohydrates such as glucose, mannose, sucrose or dextrans, mannitol; proteins; polypeptides or amino acids such as glycine; antioxidants; chelating agents such as EDTA or glutathione; adjuvants (e.g., aluminum hydroxide); and preservatives. Compositions of the present invention are in one aspect formulated for intravenous administration.

[1142] Pharmaceutical compositions of the present invention may be administered in a manner appropriate to the disease to be treated (or prevented). The quantity and frequency of administration will be determined by such factors as the condition of the patient, and the type and severity of the patient's disease, although appropriate dosages may be determined by clinical trials.

[1143] In one embodiment, the pharmaceutical composition is substantially free of, e.g., there are no detectable levels of a contaminant, e.g., selected from the group consisting of endotoxin, mycoplasma, replication competent lentivirus (RCL), p24, VSV-G nucleic acid, HIV gag, residual anti-CD3/anti-CD28 coated beads, mouse antibodies, pooled human serum, bovine serum albumin, bovine serum, culture media components, vector packaging cell or plasmid components, a bacterium and a fungus. In one embodiment, the bacterium is at least one selected from the group consisting of Alcaligenes faecalis, Candida albicans, Escherichia coli, Haemophilus influenza, Neisseria meningitides, Pseudomonas aeruginosa, Staphylococcus aureus, Streptococcus pneumonia, and Streptococcus pyogenes group A.

[1144] When “an immunologically effective amount,” “an anti-tumor effective amount,” “a tumor-inhibiting effective amount,” or “therapeutic amount” is indicated, the precise amount of the compositions of the present invention to be administered can be determined by a physician with consideration of individual differences in age, weight, tumor size, extent of infection or metastasis, and condition of the patient (subject). It can generally be stated that a pharmaceutical composition comprising the T cells described herein may be administered at a dosage of 10⁴ to 10⁹ cells/kg body weight, in some instances 10⁵ to 10⁶ cells/kg body weight, including all integer values within those ranges. T cell compositions may also be administered multiple times at these dosages. The cells can be administered by using infusion techniques that are commonly known in immunotherapy (see, e.g., Rosenberg et al., New Eng. J. of Med. 319:1676, 1988)..

[1145] In certain aspects, it may be desired to administer activated T cells to a subject and then subsequently redraw blood (or have an apheresis performed), activate T cells therefrom according to the present invention, and reinfuse the patient with these activated and expanded T cells. This process can be carried out multiple times every few weeks. In certain aspects, T cells can be activated from blood draws of from 10 cc to 400 cc. In certain aspects, T cells are activated from blood draws of 20 cc, 30 cc, 40 cc, 50 cc, 60 cc, 70 cc, 80 cc, 90 cc, or 100 cc.

[1146] The administration of the subject compositions may be carried out in any convenient manner, including by aerosol inhalation, injection, ingestion, transfusion, implantation or transplantation. The compositions described herein may be administered to a patient trans arterially, subcutaneously, intradermally, intratumorally, intranodally, intramedullary, intramuscularly, by intravenous (i.v.) injection, or intraperitoneally. In one aspect, the T cell compositions of the present invention are administered to a patient by intradermal or subcutaneous injection. In one aspect, the CAR-expressing cell (e.g., T cell or NK cell) compositions of the present invention are administered by i.v. injection. The compositions of CAR-expressing cells (e.g., T cells or NK cells) may be injected directly into a tumor, lymph node, or site of infection.

[1147] In a particular exemplary aspect, subjects may undergo leukapheresis, wherein leukocytes are collected, enriched, or depleted ex vivo to select and/or isolate the cells of interest, e.g., immune effector cells (e.g., T cells or NK cells). These immune effector cell (e.g., T cell or NK cell) isolates may be expanded by methods known in the art and treated such that one or more CAR constructs of the invention may be introduced, thereby creating a CAR-expressing cell (e.g., CAR T cell or CAR-expressing NK cell)of the invention. Subjects in need thereof may subsequently undergo standard treatment with high dose chemotherapy followed by peripheral blood stem cell transplantation. In certain aspects, following or concurrent with the transplant, subjects receive an infusion of the expanded CAR-expressing cells (e.g., CAR T cells or NK cells) of the present invention. In an additional aspect, expanded cells are administered before or following surgery.

[1148] In embodiments, lymphodepletion is performed on a subject, e.g., prior to administering one or more cells that express a CAR described herein, e.g., a BCMA-binding CAR described herein. In embodiments, the lymphodepletion comprises administering one or more of melphalan, cytoxan, cyclophosphamide, and fludarabine.

[1149] The dosage of the above treatments to be administered to a patient will vary with the precise nature of the condition being treated and the recipient of the treatment. The scaling of dosages for human administration can be performed according to art-accepted practices. The dose for CAMPATH, for example, will generally be in the range 1 to about 100 mg for an adult patient, usually administered daily for a period between 1 and 30 days. The preferred daily dose is 1 to 10 mg per day although in some instances larger doses of up to 40 mg per day may be used (described in U.S. Pat. No. 6,120,766).

[1150] In one embodiment, the CAR is introduced into immune effector cells (e.g., T cells or NK cells), e.g., using in vitro transcription, and the subject (e.g., human) receives an initial administration of CAR immune effector cells (e.g., T cells or NK cells)of the invention, and one or more subsequent administrations of the CAR immune effector cells (e.g., T cells or NK cells) of the invention, wherein the one or more subsequent administrations are administered less than 15 days, e.g., 14, 13, 12, 11, 10, 9, 8, 7, 6, 5, 4, 3, or 2 days after the previous administration. In one embodiment, more than one administration of the CAR immune effector cells (e.g., T cells or NK cells) of the invention are administered to the subject (e.g., human) per week, e.g., 2, 3, or 4 administrations of the CAR immune effector cells (e.g., T cells or NK cells) of the invention are administered per week. In one embodiment, the subject (e.g., human subject) receives more than one administration of the CAR immune effector cells (e.g., T cells or NK cells) per week (e.g., 2, 3 or 4 administrations per week) (also referred to herein as a cycle), followed by a week of no CAR immune effector cells (e.g., T cells or NK cells) administrations, and then one or more additional administration of the CAR immune effector cells (e.g., T cells or NK cells) (e.g., more than one administration of the CAR immune effector cells (e.g., T cells or NK cells) per week) is administered to the subject. In another embodiment, the subject (e.g., human subject) receives more than one cycle of CAR immune effector cells (e.g., T cells or NK cells), and the time between each cycle is less than 10, 9, 8, 7, 6, 5, 4, or 3 days. In one embodiment, the CAR immune effector cells (e.g., T cells or NK cells) are administered every other day for 3 administrations per week. In one embodiment, the CAR immune effector cells (e.g., T cells or NK cells) of the invention are administered for at least two, three, four, five, six, seven, eight or more weeks.

[1151] In one aspect, BCMA CAR-expressing cells (e.g., BCMA CARTs or BCMA CAR-expressing NK cells) are generated using lentiviral viral vectors, such as lentivirus. CAR-expressing cells (e.g., CARTs or CAR-expressing NK cells) generated that way will have stable CAR expression.

[1152] In one aspect, CAR-expressing cells, e.g., CARTs, are generated using a viral vector such as a gammaretroviral vector, e.g., a gammaretroviral vector described herein. CARTs generated using these vectors can have stable CAR expression.

[1153] In one aspect, CAR-expressing cells (e.g., CARTs or CAR-expressing NK cells) transiently express CAR vectors for 4, 5, 6, 7, 8, 9, 10, 11, 12, 13, 14, 15 days after transduction. Transient expression of CARs can be effected by RNA CAR vector delivery. In one aspect, the CAR RNA is transduced into the cell, e.g., T cell or NK cell, by electroporation.

[1154] A potential issue that can arise in patients being treated using transiently expressing CAR-expressing cells (e.g., CARTs or CAR-expressing NK cells) (particularly with murine scFv bearing CAR-expressing cells (e.g., CARTs or CAR-expressing NK cells)) is anaphylaxis after multiple treatments.

[1155] Without being bound by this theory, it is believed that such an anaphylactic response might be caused by a patient developing humoral anti-CAR response, i.e., anti-CAR antibodies having an anti-IgE isotype. It is thought that a patient's antibody producing cells undergo a class switch from IgG isotype (that does not cause anaphylaxis) to IgE isotype when there is a ten to fourteen day break in exposure to antigen.

[1156] If a patient is at high risk of generating an anti-CAR antibody response during the course of transient CAR therapy (such as those generated by RNA transductions), CAR-expressing cell (e.g., CART or CAR-expressing NK cell) infusion breaks should not last more than ten to fourteen days.

### EXAMPLES

[1157] The invention is further described in detail by reference to the following experimental examples. These examples are provided for purposes of illustration only, and are not intended to be limiting unless otherwise specified. Thus, the invention should in no way be construed as being limited to the following examples, but rather, should be construed to encompass any and all variations which become evident as a result of the teaching provided herein.

[1158] Without further description, it is believed that one of ordinary skill in the art can, using the preceding description and the following illustrative examples, make and utilize the compositions of the present invention and practice the claimed methods. The following working examples specifically point out various aspects of the present invention, and are not to be construed as limiting in any way the remainder of the disclosure.

### Example 1: BCMA-CART in Multiple Myeloma

### CART-BCMA (MCM998) Demonstrates Potent Anti-Tumor Activity In Vivo

[1159] The level of tumor burden in a KMS11 tumor model following infusion of PBS, untransduced T cells (“UTD”), or T cells transduced with either a tool CAR (“J6MO”), BCMA-4, BCMA-9, BCMA-10 (“MCM998”), BCMA-13, or BCMA-15 was evaluated. BCMA-10 demonstrated the most potent anti-tumor activity (FIG. 14).

### CART-BCMA in Multiple Myeloma Clinical Trial (NCT Number: NCT02546167; UPCC 14415)

[1160] An open-label, single-center, pilot study to assess the safety and feasibility of infusion of autologous T cells expressing BCMA-specific chimeric antigen receptors with tandem 4-1BB and CD3zeta signaling domains (referred to herein as “CART-BCMA”) in adult patients with multiple myeloma (MM) was designed (FIG. 15).

[1161] Patients were divided into three groups (FIG. 15). Cohort 1 patients received 1-5×10⁸ CART-BCMA cells given as a split dose infusion over 3 days. Cohort 2 patients received a cyclophosphamide infusion prior to administration of 1-5×10⁷CART-BCMA cells given as a split dose infusion over 3 days. Cohort 3 patients received a cyclophosphamide infusion prior to administration of 1-5×10⁸ CART-BCMA cells given as a split dose infusion over 3 days. FIG. 16A provides patient disease characteristics. FIG. 16B provides information on presence of baseline lymphopenia due to disease and prior therapies.

### CART-BCMA (MCM998) Manufacturing and Dosing

[1162] All the CART-BCMA products were successfully manufactured with minimum target threshold dose. Manufactured products had a median transduction efficiency of 22.5% (9.6-33.3%); a median fold expansion of 20.7 (7.9-60.4); median population doublings of 4.4 (2.98-5.92); median pheresis CD4/CD8 ratio of 1.03 (0.61-3.2); and median product CD4/CD8 ratio of 1.72 (0.84-3.9). Thirteen of the fourteen patients achieved max target dose of 5×10⁸ or 5×10⁷. Patient 2 of Cohort 1 received 1.9×10⁸ cells, including 69% T cells in the product. Twelve of the fourteen patients received 100% of the planned dose. Patient 1 and Patient 3 of Cohort 1 only received the first two infusions (40%) due to fevers on Day 2. These data demonstrate that CART-BCMA manufacturing is feasible in heavily pre-treated multiple myeloma patients.

### Clinical Outcomes

[1163] Clinical activity is shown in FIGS. 17A, 17B, and 17C for Cohorts 1, 2, and 3, respectively. The expansion of CART-BCMA was evaluated by flow cytometry (FIGS. 18A and 18B) and by PCR (FIGS. 19A and 19B). In vivo expansion of CART-BCMA may correlate with and predict response to therapy (FIGS. 20A and 20B). No correlation was observed between BCMA surface expression on multiple myeloma cells as determined by flow cytometry and clinical outcomes (data not show).

### Example 2: Correlative Analysis of Clinical Trial Data

[1164] To identify biomarkers predictive of patient response to CART-BCMA treatment, the parameters listed in Table 28 were analyzed.

TABLE 28
Biomarker parameters

| Parameter | Sample type | Technology |
|---|---|---|
| Release profile: | Product | Several: Expansion, T cell |
| QC and | | count, CD4/CD8, CAR+, IFN-γ, |
| informational | | cytotox |
| CART PK | Bone marrow | Flow, qPCR |
| | (BM), blood | |
| Serum cytokines | Blood | MSD/Luminex |
| Immunophenotype | Apheresis and | Flow |
| | Product | |
| Gene signature | Apheresis and | RNAseq |
| analysis | Product | |
| TCR diversity | Apheresis and | Deep sequencing |
| | Product | |
| Serum proteins | Serum: pre and | Somascan |
| | post infusion | |
| Target expression | Bone marrow | ELISA: BCMA levels, soluble |
| (surface and | (BM), blood | ligands |
| soluble) | | |
| (CAR) T-cell tumor | Bone marrow | ISH/IHC |
| infiltration/ | (BM) | |
| suppression | | |

[1165] The fraction of CAR+ CD4/CD8 cells in patient samples was acquired at various time-points post-CART-BCMA infusion for Responders (patient having complete response (CR), very good partial response (VGPR), or partial response (PR)) and Non-Responders (patients having minor response (MR), stable disease (SD), or progressive disease (PD)) (FIGS. 21A, 21B, 21C, and 21D). These data demonstrate that Responders had greater persistence of CAR+ CD4/CD8 cell populations over time, as compared to Non-responders.

### Evaluation of Cytokine Levels

[1166] The change in level of cytokine expression at various time points post infusion of CART-BCMA was evaluated (FIG. 22). These data demonstrate that the greatest changes from baseline (Day 0) occurred in the level of IL-6 (FIGS. 23A and 23B), IL-10, monokine induced by gamma interferon (MIG), and IFN-γ (FIGS. 24A and 24B). Importantly, IFN-γ may differentiate Responders to CART-BCMA treatment from Non-Responders.

### Evaluation of BCMA Levels in Serum

[1167] The serum level of BCMA was evaluated in 14 normal donors and 12 myeloma patients (FIGS. 25A and 25B). BCMA was present in normal donors at a serum concentration of about 40 ng/mL, and in myeloma patients at a median serum concentration of 176 ng/mL at baseline. Serum levels of BCMA were also acquired at various time points post infusion of CART-BCMA (FIGS. 26A, 26B, 26C, and 26D). These data demonstrate that some patients with high baseline serum BCMA levels responded well to CART-BCMA treatment (FIG. 26A). In addition, serum BCMA levels could serve as a marker of response to CART-BCMA treatment (FIGS. 26C and 26D).

### Evaluation of the Percentage of CD4+ and CD8+ CART Cells

[1168] The percentage of CD4+ and CD8+ CART cells was acquired at various time points post infusion of CART-BCMA in three patients (FIGS. 27A, 27B, and 27C). Responders as shown in FIGS. 27A and 27C had a dramatic expansion of CAR T cells as seen by high BBz copy numbers. Expansion was mainly driven by CD8+ CARTs. Although non-responders also had high BCMA levels, no expansion was seen (FIG. 27B).

### Evaluation of CD4+ and CD8+ T Cell Subsets

[1169] The level of CD4+ and CD8+ T cell subsets of normal donors and multiple myeloma (MM) patients were compared (FIGS. 28A, 28B, 28C, and 28D). MM patients had a lower percentage of Tn1 cells in comparison to normal donors. The level of Tscm and Te cells were similar in normal donors and MM patients. MM patients had a higher median percentage of Tem cells. The level of CD4+ and CD8+ T cell subsets in apheresis samples were also acquired from MM patients (FIGS. 28E and 28F).

[1170] T cell differentiation in apheresis samples was acquired from MM patients (FIG. 29). The level of CD4+ and CD8+ T cell subsets (e.g., CD4+ or CD8+ cells based on the expression of PD1, CD27, and/or GzB) were also determined in MM patients (FIGS. 30A and 30B).

### Example 3: Predictive Correlates of Response to BCMA Chimeric Antigen Receptor (CAR) T Cell Therapy in Patients with Multiple Myeloma

[1171] This example describes studies that aimed to discover biomarkers that could predict the clinical response of subjects to treatment with CART-BCMA before the manufacturing of the CART-BCMA.

[1172] Peripheral blood samples were collected from a total of eight multiple myeloma (MM) human patients and were stained with a 14-parameter flow cytometry panel and analyzed on a flow cytometry instrument.

[1173] These MM patients received CART-BCMA treatment as described in Example 1. Based on clinical response at 28-days post infusion, patient samples were classified as Responders (R, defined as patients having CR, VGPR, or PR, N_{R}=3) or Non-Responders (NR, defined as patients having MR, SD, or PD, N_{NR}=5).

[1174] To identify a biomarker signature that correlated with clinical response, pre-gating was performed to limit analysis to viable, singlet, lymphocytes. Subsequently, pre-gated data was used for data mining and biomarker identification, using flowType (Aghaeepour et al. Bioinformatics. 28(7):1009-1016, 2012), a bio-statistical automated algorithm, based on R⁺ (https://www.r-project.org/about.html). FlowType uses a simple threshold or clustering algorithm to partition every channel/marker density to a positive and a negative cell population based on the assumption that the expression of a marker is either on or off (i.e., there are two distinct populations). These partitions are then combined to generate a set of multi-dimensional phenotypes. In addition, and to allow for exclusion of markers from subset identification, each marker could also be assigned a ‘neutral’ value (i.e., that marker is excluded from a phenotype). This algorithm generates a total number of possible phenotypes of 3^{N} where N is the number of markers (N=14 in the present experiment).

[1175] The length of a phenotype was limited to a maximum of four markers to allow for the identification of biologically meaningful phenotypes, as too many markers may lead to the generation of phenotypes with very small cell counts that would be difficult to interpret. This process generated a set of 1,697 possible phenotypes. Beyond these exploratory phenotypes, a subset of combinations of the above phenotypes, such as CD4:CD8 ratio, Viable T cells (%), % Monocytes, and % B-cells were also considered.

[1176] To measure the predictive power of each phenotype, a T-test was used to evaluate the difference between the measured phenotypes' cell frequencies (the number of cells in that phenotype divided by the total number of cells in the parent population) among Responders (R) and Non-Responders (NR). The most statistically significant phenotypes were selected for manual confirmation using FlowJo.

[1177] The CD4:CD8 ratio was found to be a clear differentiator in the aphaeresis samples, in terms of clinical response (FIGS. 1A and 1B). The area that most likely separates Responders from Non-Responders corresponds to a CD4:CD8 ratio range of between 1 and 1.6, suggesting that patients with higher levels of CD4 populations (e.g., a CD4:CD8 ratio of greater than or equal to 1.6) in their aphaeresis samples are likely to respond to the CART-BCMA treatment (FIG. 1B).

[1178] Higher levels of the CD8+ stem memory T cells (TSCM) populations HLADR-CD95+CD27+ (FIG. 2A), CD45RO−CD27+ (FIG. 2B), and CCR7+CD45RO−CD27+ (FIG. 2C) were also observed in Responders as compared to Non-Responders, suggesting that patients with higher levels of these TSCM populations in their aphaeresis samples are likely to respond to the CART-BCMA treatment.

[1179] The analysis, described above, of T cells in the pre-BCMA manufacturing apheresis samples from multiple myeloma patients demonstrated a high CD4:CD8 ratio in patients who later responded to the CART-BCMA therapy and a low CD4:CD8 ratio in Non-Responders. Thus, selecting for patients with a high CD4:CD8 ratio in their aphaeresis material may potentiate for a more efficacious treatment outcome. In addition, these data and the bioinformatics tools suggest that immunological biomarkers could be integrated as a means to identify which patients are most likely to respond to the CART-BCMA therapy, leading to an ideal personalized approach to cellular therapy.

### Example 4: Analysis of Multiple Myeloma Tumor Biopsies

[1180] Bone marrow core biopsy samples were acquired from patients enrolled in the University of Pennsylvania clinical trial entitled “Pilot Study Of Redirected Autologous T Cells Engineered To Contain an Anti-BCMA scFv Coupled To TCR And 4-1BB Signaling Domains in Patients With Relapsed and/or Refractory Multiple Myeloma” (NCT Number: NCT02546167; UPCC 14415) for analysis. Bone marrow core biopsy samples were collected prior to administration (“Pretreatment” or “Pre”) or on Day 28, Day 43, or Day 90 post-infusion. Biopsy samples were formalin fixed with Immunocal™ decalcification and embedded in paraffin; and sample processing quality was confirmed by in situ hybridization (ISH) to the house keeping gene PPIB RNA.

### Analysis of CD138+ MM Cell Localization and BCMA Expression

[1181] CD138+ MM cell localization data from bone marrow core biopsy samples from Patient 13, Patient 14, Patient 15, Patient 16, and patient 17 were acquired prior to administration (“Pretreatment” or “Pre”), and on Day 28 and Day 90 (“3 month”) post-infusion (FIG. 3). Patient 13 had minimal CD138 expression in their pretreatment, Day 28, and Day 90 samples (FIG. 3). Patient 14 had an increased number of CD138+ MM cells in their Day 28 sample compared to their pretreatment sample (FIG. 3). Patient 15, Patient 16, and Patient 17 each had extensive infiltration of CD138+ MM cells at baseline, followed by a reduction in the Day 28 samples and an increase in the 3-month samples (FIG. 3).

[1182] Patient outcomes to treatment with CART-BCMA and estimated % CD138 infiltration are provided in Table 29.

TABLE 29
Patient outcomes to CART-BCMA treatment and estimated % CD138 infiltration

| CD138 | | | | | | |
|---|---|---|---|---|---|---|
| staining | Estimated % CD138 infiltration | | | | | Pregression free |
| Patient | Pre | Response | Day 90 | D 43 | | survival (PFS) |
| Patient 7 | | | | 50% | Partial regression (PR) | 1.5 |
| Patient 8 | 70% | | | | Progressive disease (PD) | 0.5 |
| Patient 12 | | 40% | | | Stable disease (SD) | 1.5 |
| Patient 13 | 1% | 0% | 0% | | Minor response (MR) | 4+ |
| Patient 14 | 80% | 90% | | | Stable disease (SD) | 1.5 |
| Patient 15 | 95% | 5% | 10% | | Very good partial | |
| | | | | | regression (VGPR) | |
| Patient 16 | 50% | 5% | 95% | | Partial regression (PR) | 2+ |
| Patient 17 | 50% | 5% | 75% | | Partial regression (PR) | 2+ |

[1183] BCMA expression data from bone marrow core biopsy samples were similarly acquired and analyzed (FIG. 4).

[1184] Discordance between BCMA protein expression as measured by IHC and BCMA mRNA expression as measured by ISH was observed in Patient 13 and Patient 14 (FIG. 5).

[1185] In Patient 15, high BCMA protein and mRNA levels were observed in pretreatment samples, followed by a marked reduction in Day 28 samples and a recurrence in Day 90 samples (FIG. 6A). Rare CAR^{Lo} positive cells were observed in Day 28 and Day 90 samples (FIG. 6A). In Patient 16, a marked reduction in BCMA protein and mRNA signal was observed at Day 28, followed by an increase at Day 90 (FIG. 6B). Rare CAR^{Lo} positive cells were observed at Day 28 and Day 90 (FIG. 6B). In Patient 17, a reduction in the number of BCMA positive cells and a reduction in BCMA mRNA signal/cell were observed at Day 28 (FIG. 6C). BCMA mRNA signal/cell returned to base line level at Day 90 (FIG. 6C). Equivocal CAR^{Lo} mRNA signal was detected at Day 90 (FIG. 6C).

[1186] In summary, variability in BCMA protein and mRNA expression was observed at base line and appeared to correlate with response in the sample set examined Decreased CD138 positive cell infiltration was observed in 3 of 5 patients at 28 days and was associated with decreased BCMA protein and mRNA expression. Increased CD138 positive cell infiltration was observed in these same patients at 3 months and was associated with a return of BCMA expression.

Analysis of IDO1, IFN-γ, and TGFβ mRNA Levels

[1187] The expression of IDO1, IFN-γ, and TGFβ mRNA levels was determined by ISH in Pretreatment, Day 28, and Day 90 bone marrow core biopsy samples acquired from Patient 15 (FIG. 7A), Patient 16 (FIG. 7B), and Patient 17 (FIG. 7C).

[1188] In Patient 15, an increase in IDO1 mRNA levels was observed in the Day 28 and Day 90 samples as compared to the Pretreatment sample (FIG. 7A). Minimal change was observed in the level of IFN-γ mRNA in all tested samples (FIG. 7A). A reduction in TGFβ mRNA levels was observed in the Day 28 and Day 90 samples as compared to the Pretreatment sample, and this change may be due to a reduction in the level of MM cells (FIG. 7A).

[1189] In Patient 16, an increase in IDO1 mRNA levels was observed at the site of persistent MM cells (FIG. 7B). Rare IFN-γ mRNA positive cells were observed in the Day 28 and Day 90 samples, while a marked increase in TGFβ mRNA levels was observed in MM cells in the Day 90 sample over baseline (FIG. 7B).

[1190] In Patient 17, an increase in IDO1 mRNA levels was observed in the Day 28 sample as compared to the Pretreatment sample (FIG. 7C). A low level of IFN-γ mRNA was observed at all time points (FIG. 7C). A reduction in TGFβ mRNA levels was observed in the Day 28 sample as compared to the Pre sample, and this change may be due to a reduction in the level of MM cells (FIG. 7C).

[1191] These data show that a modest increase in IDO1 mRNA expression was observed in bone marrow at Day 28.

[1192] A similar ISH analysis was conducted in Pretreatment, Day 10, and Day 28 biopsy samples acquired from Patient 19 (FIG. 7D) and Patient 20 (FIG. 7E). An increase in IFN-γ and IDO1 mRNA expression was observed at Day 10.

### Analysis of PD-L1, PD1, CD3, and FoxP3 Protein Expression Levels

[1193] The level of PD-L1, PD1, CD3, and FoxP3 protein expression was determined by IHC in Pretreatment, Day 28, and Day 90 bone marrow core biopsies acquired from Patient 15 (FIG. 8A), Patient 16 (FIG. 8B), and Patient 17 (FIG. 8C).

[1194] In Patient 15, an increase in PD-L1 stromal cell expression was observed at Day 90 (FIG. 8A). No change in PD1, CD3, or FoxP3 expression was observed in the tested samples (FIG. 8A).

[1195] In Patient 16, an increase in PD-L1 stromal cell expression was observed at Day 90 (FIG. 8B). No PD1+ cell infiltration was detected (FIG. 8B). No change in CD3+ or FoxP3+ cell number was detected (FIG. 8B).

[1196] In Patient 17, PD-L1 stromal cell expression was observed at all time points (FIG. 8C). No PD1+ cell infiltration was detected and no change in CD3 or FoxP3 expression was observed in the tested samples (FIG. 8C).

[1197] A similar IHC analysis was conducted in Pretreatment, Day 10, and Day 28 biopsy samples acquired from Patient 19 (FIG. 8D) and Patient 20 (FIG. 8E). These two patients showed an increase in PD1 or PD-L1 in Day 10 samples.

[1198] These data show that while consistent changes in PD-L1, PD1, CD3, and FoxP3 were not observed, up-regulation of PD-L1 and/or PD1 in some patients may represent a potential escape mechanism.

### Analysis of CD19 Protein Expression Levels

[1199] CD19 protein expression was determined by IHC in Pretreatment, Day 28, and Day 90 bone marrow core biopsies acquired from Patient 13, Patient 14, Patient 15, Patient 16, and Patient 17 (FIG. 9). An increase in the relative proportion of CD19 positive MM cells was observed in Patient 15 and Patient 17 at 28 days and 3 months (FIG. 9).

[1200] BCMA positive cells and CD19 positive cells were determined to be separate populations in the Pretreatment and Day 90 bone marrow core biopsies acquired from Patient 15 (FIGS. 11A and 11B).

[1201] CD19+CD34^{dim} cell population was present in the Pretreatment bone marrow core biopsies acquired from Patient 15 (FIG. 12A) and Patient 17 (FIG. 12B).

[1202] The CD19 population is variably CD138+ and CD138− in the Pretreatment samples acquired from Patient 15 (FIG. 13).

[1203] These data suggests that a combination therapy including a CART-BCMA and a CD19-targeted therapy may be beneficial in the treatment of MM patients.

### Analysis of CD20 Protein Expression Levels

[1204] CD20 protein expression was determined by IHC in bone marrow core biopsies acquired prior to administration, and on Day 28 and Day 90 post-infusion of CART-BCMA from Patient 13, Patient 14, Patient 15, Patient 16, and Patient 17 (FIG. 10). Pre-existing CD20 positive MM cells were observed in samples acquired from patient 14 (FIG. 10). An emergence of CD20 positive MM cells was observed in patient 15 and patient 17 (FIG. 10).

[1205] These data suggest that a combination therapy including a CART-BCMA and a CD20-targeted therapy may be beneficial in the treatment of MM patients.

### Example 5: Clinical and Biologic Activity of B-Cell Maturation Antigen-Specific Chimeric Antigen Receptor T Cells (CART-BCMA) in Refractory Multiple Myeloma

### SUMMARY

[1206] Chimeric antigen receptor (CAR) T cells are emerging as a promising new therapy in hematologic malignancies. B-cell maturation antigen (BCMA) is a cell-surface receptor with expression largely restricted to plasma cells, making it a rational target for multiple myeloma (MM) therapy. A phase I study of autologous T cells transduced with a novel, fully human, BCMA-specific CAR containing CD3 and 4-1BB signaling domains (CART-BCMA) was conducted in subjects with relapsed/refractory MM after 3 or more prior lines of therapy. Reported here are mature results from Cohort 1 of this study, using a dose of 1-5×10⁸ CART-BCMA cells administered without prior chemotherapy conditioning. Nine subjects with a median of 9 prior therapy lines were treated; all had high-risk cytogenetics. CAR T cells were successfully manufactured and were detectable post-infusion in all cases. Four subjects (44%) had an objective response (1 PR, 2 VGPR, 1 sCR), with median duration of response of 4 months, including 1 subject with ongoing stringent complete response 21 months after CART-BCMA treatment. Compared with non-responders, responders had greater magnitude of in vivo CART-BCMA expansion, which was in turn associated with pre-manufacturing CD4:CD8 ratio and magnitude of expansion during manufacturing. Cytokine release syndrome was the most frequent treatment-related adverse event, occurring in 8 of 9 subjects (3 grade 3/4). Grade 4 encephalopathy was observed in 2 subjects. Median overall survival is estimated at 551 days. CART-BCMA infusions given without lymphodepleting chemotherapy are clinically active in heavily-pretreated MM patients and represent a novel approach to MM therapy.

### Results

### Protocol Design and Enrolment

[1207] A phase I study (NCT02546167) was opened to evaluate the feasibility, safety, clinical activity, and biologic activity of manufacturing and administering CART-BCMA cells to relapsed/refractory myeloma patients. BCMA expression on myeloma cells was assessed by flow cytometry but no pre-specified level was required for enrolment. After a 2-week washout from therapy, subjects underwent steady-state leukapheresis to collect T cells for CART-BCMA manufacturing, typically a 3 to 4-week process. Anti-myeloma therapy could resume during manufacturing until 2 weeks prior to first CART-BCMA infusion. CART-BCMA cells were administered in an outpatient research unit over 3 days as split-dose intravenous infusions (10% of dose given on day 0; 30% on day 1, and 60% on day 2), as per prior adult CTL019 trials (Porter et al., Sci. Transl. Med. 7, 303ra139 (2015)). In cohorts 2 and 3 (described below), cyclophosphamide (Cy) was administered for lymphodepletion 3 days prior to first CART-BCMA infusion (FIG. 31).

[1208] Initially a standard 3+3 dose-escalation design was used, exploring 3 sequential cohorts: 1) 1-5×10⁸ CART-BCMA cells alone; 2) Cy 1.5 g/m²+1-5×10⁷ CART-BCMA cells; and 3) Cy 1.5 g/m²+1-5×10⁸ CART-BCMA cells. The protocol was later amended to allow treatment of additional subjects in each cohort, in order to gain more information about the safety and efficacy of CART-BCMA cells both with and without lymphodepleting conditioning (i.e. Cy), and at a higher (1-5×10⁸) and lower (1-5×10⁷) dose. Reported here are outcomes for the 9 subjects treated on Cohort 1 with CART-BCMA cells alone, now with mature follow-up. Enrollment and follow-up for Cohorts 2 and 3 are ongoing.

[1209] Twelve subjects consented during Cohort 1 enrollment; 2 never collected T cells (1 ineligible due to severe restrictive lung disease; 1 with rapid disease progression/clinical decline). Ten successfully manufactured CART-BCMA cells; 1 was never infused due to rapid progression/clinical decline, and 9 were infused between November 2015 and September 2016 (FIG. 37).

### Subject and CART-BCMA Product Characteristics

[1210] Subject demographics, prior lines of therapy, and disease characteristics are summarized in Table 30, with individual details shown in Table 32. Median age of treated subjects was 57, with 67% male. These subjects had a median of 9 prior lines of therapy, and 8/9 (89%) were dual-refractory to at least 1 proteasome inhibitor and immunomodulatory agent. All had at least 1 high-risk cytogenetic abnormality; 67% had either deletion 17p or a TP53 mutation. Baseline tumor burden was high (median 80% myeloma cells on pre-treatment bone marrow biopsy), and 2/9 (22%) had extramedullary disease. Median absolute lymphocyte count (ALC) and total CD3 count pre-leukapheresis were 830 and 325 cells/tit, respectively, and had declined to 500 and 258 cells/tit, respectively, by the time of CART-BCMA infusions, reflecting the advanced disease and extensive prior treatment in this cohort.

[1211] All 9 subjects successfully manufactured the minimum goal CART-BCMA cells (1×10⁸), though 1 subject required 2 leukapheresis/manufacturing attempts. Median transduction efficiency was 22.2% (range 9.6-33.3%), with median 12.7-fold expansion of seeded cells during manufacturing. Final products were comprised of a median of 96% CD3+ T cells, with median CD4/CD8 ratio of 1.6. Six subjects received all 3 planned CART-BCMA infusions, with 3 (subjects 01, 03, and 15) receiving only 40% of planned dose (3′ infusion held due to fevers and signs of CRS). Further details of manufacturing, product characteristics, and dosing for each subject are shown in Table 33.

### Clinical Outcomes

[1212] Four of 9 subjects (44%) achieved a partial response (PR) or better, including 1 PR, 2 very good partial responses (VGPR), and 1 stringent complete response (sCR). Two additional subjects had minimal response (MR), and 3 had no response (FIG. 32A). Median time to first response was 14 days. Based on Kaplan-Meier estimates, median duration of response (for those with PR or better) was 120 days (range 29-665+); and median progression-free survival (PFS) was 65 days (range 13-679+). Three subjects had no detectable myeloma by flow cytometry (estimated sensitivity 10⁻⁵) from marrow aspirates performed on day 28 (subjects 01, 15) or day 45 (subject 03) after CART-BCMA infusions. Subjects 03 and 15 achieved VGPR but progressed at 5 and 4 months, respectively. Subject 01 had 11 prior lines of therapy, was refractory to bortezomib, lenalidomide, carfilzomib and pomalidomide, and had deletion 17p along with mutations in TP53 and NRAS, reflecting very poor-risk disease. He was progressing rapidly prior to CART-BCMA therapy, with 70% marrow plasma cells, serum M-spike of 2.0 g/dL, 24-hour urine M-spike of 3900 mg, serum free kappa of 6794 mg/L, hypercalcemia and acute renal insufficiency (serum creatinine 1.82 mg/dL). He had gradual evolution of his response from PR (day 14) to VGPR (month 3), CR (month 6), and then to sCR (month 9), and remains in sCR 21 months after CART-BCMA infusion. One subject (03) with extramedullary involvement of paraspinal muscles and pleura had complete metabolic response on PET/CT 5 weeks after CART-BCMA infusion, including resolution of malignant pleural effusion (FIG. 32B), demonstrating ability of CART-BCMA cells to traffic outside blood and marrow compartments. The other subject (08) with extramedullary disease had no response. At time of data cutoff (9/11/17), 5 subjects had died, and estimated median overall survival (FIG. 32C) was 551 days (range 24-679+).

### Safety

[1213] Grade 3 or higher adverse events were seen in 8/9 (88%) of subjects and are summarized in Table 31, with all adverse events for each subject listed in Table 34. Cytokine release syndrome (CRS), a well-described complication of CAR T cell therapy, was observed in 8 subjects: 1 grade 1, 4 grade 2, 3 grade 3, and 1 grade 4. Median time of CRS onset was 3.5 days after first infusion (range 1-8), with a median duration of 8 days (range 3-12), and median duration of hospitalization of 9 days (range 3-40). CRS was associated with elevations in ferritin and C-reactive protein. Four subjects received tocilizumab, the anti-IL6 receptor antibody, with 3 requiring a second administration (subjects 01, 03, 08), and 2 requiring care in the intensive care unit.

[1214] Neurotoxicity is a common adverse event after CAR T cell therapy, ranging from mild confusion or concentration defects to focal neurologic deficits, global encephalopathy, aphasia, seizures, and/or obtundation. Subject 01 had grade 1 confusion, which resolved without intervention, in the setting of grade 3 CRS. Two subjects (03 and 08) developed severe (grade 4) neurotoxicity following CART-BCMA infusions. Both had high tumor burden with extramedullary disease and rapid progression at time of treatment, and both had received tocilizumab for severe CRS. Subject 03 developed obtundation and recurrent seizures requiring intubation, in the setting of rising peripheral lymphocyte count suggesting rapid CART-BCMA proliferation. MRI of the brain on day 15 showed diffuse white matter enhancement most pronounced in the posterior lobes, with sulcal effacement suggestive of early cerebral edema. At the time cerebral edema had not yet been described as a consequence of CAR T cell therapy (Abbasi et al., JAMA 317, 2271 (2017)), and her clinical and radiologic picture was felt to be most consistent with posterior reversible encephalopathy syndrome (PRES). She received high-dose intravenous steroids (methylprednisolone 1 g/day×3 days) without improvement, and then received cyclophosphamide 1.5 g/m2 on day 17, with rapid neurologic improvement within 48 hours, near complete resolution of abnormal enhancement on MRI day 23, and no residual neurologic deficits. Further details are described separately (Garfall et al., Blood 128, 5702-5702 (2016), incorporated by reference in its entirety).

[1215] Subject 08 had rapidly progressive myeloma at time of CART-BCMA infusions, with 80% marrow plasma cells and extramedullary involvement of skin, lymph nodes, liver, adrenals, and kidneys, along with progressive renal dysfunction (Cr 2.87 g/dL). He developed grade 4 CRS on day 15 associated with worsening kidney injury, atrial fibrillation, hypoxia, hypotension, coagulopathy, delirium, and transaminitis He had hemodynamic stabilization after tocilizumab, but had progressive grade 4 encephalopathy/obtundation requiring intubation day 17. MRI of the brain was unremarkable with no evidence of cerebral edema, but progressive myeloma in the base of skull was noted. He received steroids with improvement in mental status and was extubated on day 20. On day 22 he developed recurrent shock and hypoxia requiring intubation; blood cultures subsequently showed candidemia. Peripheral blood now showed 13% circulating plasma cells and labs confirmed progressive myeloma; in this setting his family opted for comfort care only and he expired on day 24. No other deaths occurred while on study.

### Kinetics of CART-BCMA Engraftment and Persistence

[1216] All infused subjects had detectable CART-BCMA cells in peripheral blood by qPCR analysis, and CAR⁺ T cells were detectable in 8/9 subjects by flow cytometry (FIG. 33A; FIG. 38 for representative staining). Expansion peaked at day 10 for most subjects, with CART-BCMA cells comprising over 75% of all circulating CD3+ T cells in the two subjects (01, 03) with greatest expansion, corresponding to 5300 and 8700 circulating CART-BCMA cells per μL of blood, respectively, at the peak of expansion (FIG. 39). Despite a predominance of CD4+ T cells in the CART-BCMA product pre-infusion, CART-BCMA cells circulating in blood were predominantly CD8+, and were highly activated, with a median of 94% (range 33-98%) of CAR+CD3+ cells expressing HLA-DR during peak expansion (Table 35). CART-BCMA levels in marrow aspirates generally mirrored those in peripheral blood, and also were elevated in pleural fluid and cerebrospinal fluid for subject 03 (Table 36). CART-BCMA cells showed a limited duration of detection within blood in most subjects. In all but 2 subjects (01, 03), CART-BCMA cells were no longer detectable by flow cytometry after day 28 but remained detectable by qPCR to day 60 in ⅞ tested, including in subject 01 (in stringent CR), who continues to have detectable cells at 21 months (FIG. 33A). Responses were significantly associated with peak expansion by qPCR (median 102507 copies/μg DNA for ≥PR vs. 4187 copies/μg for <PR, p=0.016), as well as with persistence over the first 28 days, as measured by the area under the curve (AUC_{0-28d}) (median 885181 copies*days/μg DNA for ≥PR vs. 26183 copies*days/μg DNA for <PR, p=0.016) (FIG. 33B).

### Changes in Soluble Factors Post-CART-BCMA

[1217] A total of 30 cytokines were quantified in peripheral blood serum before and after CART-BCMA infusion. The most consistent changes from baseline (>5-fold increase) were seen for IL-6, IL-10, monokine induced by interferon-gamma (MIG, CXCL9), IP10, and IL-1 receptor alpha (FIG. 40). Cytokine increases were most pronounced in subjects with greatest expansion and response, peaking at time of peak expansion and with clinical manifestations of cytokine release syndrome, similar to patterns previously described with CD19-directed CAR T cells (Porter et al., Sci. Transl. Med. 7, 303ra139 (2015); Teachey et al., Cancer Discov. 6, 664-679 (2016)). The subjects with the deepest responses (01, 03, 15) all had peak IL-6, IL-10, and MIG concentrations >50-fold above baseline. The timing of CRS also was associated with response, with a median onset of 2 days (range 1-3) after first infusion in subjects with PR or better, compared with 4.5 days (range 4-8) in subjects without PR (p=0.029, Mann-Whitney test).

[1218] BCMA is shed from the surface of plasma cells by gamma-secretase-mediated cleavage (Laurent et al., Nat Commun 6, 7333 (2015)), leading to a soluble form (sBCMA) that is detectable in circulation. Elevated sBCMA levels are found in myeloma patients and higher concentrations of sBCMA are associated with poorer clinical outcomes (Sanchez et al., Br. J. Haematol. 158, 727-738 (2012)). The impact of CART-BCMA on serum concentration of sBCMA, as well as its ligands BAFF and APRIL, was serially assessed. Compared to a panel of healthy donors (HD, n=6, median sBCMA 41.6 ng/ml, range 25.2-84.4), most of the subjects had an elevated sBCMA concentration in blood at baseline (median 1532 ng/ml, range 78.2-6101.3), along with concomitant suppression of APRIL (median 0.04 ng/ml, range 0.01-0.96, compared to HD, median 5.69 ng/ml, range 3.07-6.24). BAFF concentrations (median 0.84 ng/ml, range 0.51-4.98) were not significantly different from HD (median 0.93 ng/ml, range 0.58-1.24). Baseline sBCMA concentration did not correlate with response (FIG. 41), but decline in sBCMA concentration after CART-BCMA was most pronounced in subjects with the deepest responses (01, 03, 15). sBCMA also started to rise again at time of progression for subjects 03, 07, 15 (FIG. 34), suggesting that sBCMA concentration in blood may be a useful biomarker for assessing myeloma disease burden.

[1219] All subjects had depressed frequencies of blood CD19+ B cells at baseline (median 1.9% of CD45+CD14− gate, range 0.1%-4.5%), likely due to immune suppression from progressive myeloma and extensive prior therapy. However, in contrast to patients treated with CD19-directed CAR T cells, which cause prolonged B cell aplasia (Maude et al., N. Engl. J. Med. 371, 1507-1517 (2014)), 6 of 9 subjects treated with CART-BCMA cells had recovery of B cells, typically 2-3 months post-infusions. B cell recovery was most pronounced in subjects with the deepest responses (01, 03, 15), and was generally, though not always, associated with an increase in the concentration of serum BAFF and/or APRIL (FIG. 34), ligands known to promote normal B cell development, proliferation, and survival (Rickert et al., Immunol. Rev. 244, 115-133 (2011)). Importantly, B cell frequency remains normal in subject 01 despite prolonged persistence of circulating CART-BCMA cells, consistent with the previously-reported absence of BCMA expression on the majority of circulating B cells (Seckinger et al., Cancer Cell 31, 396-410 (2017); O'Connor et al., J. Exp. Med. 199, 91-98 (2004)).

### BCMA Expression on Myeloma Cells

[1220] Eight subjects were evaluable for BCMA expression by flow cytometry on myeloma cells prior to treatment, and all had detectable BCMA expression (FIG. 35) (see FIG. 42 for representative gating). Baseline intensity of BCMA varied from subject to subject, and did not appear to correlate with degree of CART-BCMA expansion or response (FIG. 43) in this small cohort. Post-treatment, 7 subjects had myeloma cells evaluable for BCMA expression. One subject (03) had significantly decreased BCMA staining intensity, relative to the fluorescence minus one (FMO) control, at time of progression (day 164) compared to pre-treatment, suggesting either downregulation of surface expression, immune selection of BCMA-dim/negative variants, and/or increased shedding from the cell surface.

### Predictors of CART-BCMA Expansion

[1221] As described above, and consistent with prior CAR T cell studies (Turtle et al., Sci. Transl. Med. 8, 355ra116 (2016); Porter et al., Sci. Transl. Med. 7, 303ra139 (2015); Ali et al., Blood 128, 1688-1700 (2016)), responding subjects had greater expansion and persistence of CART-BCMA cells, and more profound cytokine release, than non-responders. In order to explore pre-treatment characteristics potentially associated with strong expansion, features of the CART-BCMA product before, during, and at end of manufacturing were analyzed. It was found that a higher CD4/CD8 ratio in the leukapheresis product, as well as in the seed culture at the start of manufacturing (i.e. following the elutriation step to remove monocytes), was associated with greater CART-BCMA expansion in subjects (FIGS. 36A and 36B), while total CD3 T cell number in the leukapheresis product or seed culture, or CD4/CD8 ratio in final product at end of manufacturing was not (data not shown). Fold expansion of seeded cells during manufacturing also correlated with in vivo CART-BCMA expansion (FIG. 36C), suggesting that in vitro proliferative capacity may predict for in vivo activity. Finally, previous analyses in CLL patients receiving CD19-directed CAR T cells had demonstrated that better CAR T cell expansion and clinical responses were associated with a higher percentage of CD8+ T cells within the leukapheresis specimen expressing a CD27+CD45RO− phenotype (24). CD8+ T cells within the leukapheresis products of 9 subjects treated with CART-BCMA cells alone were examined and a similar correlation was found between the frequency of CD27+CD45RO− cells and CART-BCMA expansion in vivo (FIG. 36D).

### DISCUSSION

[1222] CAR T cell therapy is emerging as a promising therapeutic option for B-cell malignancies, with the potential for durable disease control following a single treatment, differentiating it from other therapies that require repeated and/or continuous administration. In this report, the potential of CAR T cell therapy in advanced and refractory myeloma is demonstrated, with 4/9 subjects achieving a partial response or better, including an ongoing stringent complete remission 21 months post-infusion, as well as 2 additional subjects with minor responses. This is notable given the highly adverse biological features of the enrolled subjects' myeloma, including high tumor burden, rapidly progressing disease, and high-risk genetics. CAR T cell products were successfully manufactured from all subjects, despite baseline T cell lymphocytopenia, and engraftment was seen in all subjects as well, though peak levels and persistence of CAR T cells varied significantly amongst subjects.

[1223] Myeloma has long been associated with quantitative and functional deficits in T cells, particularly in more advanced, refractory disease, with inverted CD4/CD8 T cell ratios, impaired ex vivo anti-tumor activity, and acquisition of an exhausted or senescent phenotype (Kay, et al., Blood 98, 23-28 (2001); Dhodapkar, et al., J. Exp. Med. 198, 1753-1757 (2003); Suen, et al., Leukemia 30, 1716-1724 (2016)). In this study responses correlated with degree of in vivo expansion, which in turn was associated with higher pre-manufacturing CD4/CD8 T cell ratio, pre-manufacturing frequency of CD45RO−CD27+CD8+ T cells, and magnitude of in vitro proliferation during manufacturing. This suggests that more effective CART-BCMA products may be derived from subjects with a less differentiated, more “naïve-like” T cell compartment, as previously observed in a CLL trial using CD19-directed CAR T cells (Fraietta, et al., Blood 128, 57-57 (2016)). These findings suggest that pre-treatment phenotypic and/or functional T cell characteristics may eventually help predict subjects likely to respond or not to CART-BCMA therapy. They also suggest that treatment of patients earlier in the course of their disease, when T cells may be intrinsically “fitter,” may be more effective.

[1224] The observed CAR T cell expansion and clinical activity is also notable due to the lack of any chemotherapy given as pre-infusion conditioning in this cohort. Chemotherapeutics such as cyclophosphamide have been demonstrated to enhance T cell-mediated anti-tumor immunity via multiple potential mechanisms, including reduction of cellular “sinks” leading to increased availability of IL-7 and IL-15; depletion of suppressor cell populations such as regulatory T cells; induction of mucosal damage with release of Toll-like receptor agonists which enhance maturation of antigen-presenting cells; and alteration of gut microbiota (Gattinoni, et al., Nat. Rev. Immunol. 6, 383-393 (2006); Viaud, et al., Science 342, 971-976 (2013)). Thus, adoptive transfer of tumor-specific T cells, including CAR T cells, in humans has most commonly followed some form of lymphodepleting conditioning (Porter, et al., Sci. Transl. Med. 7, 303ra139 (2015); Rapoport, et al., Nat. Med. 21, 914-921 (2015); Noonan, et al., Sci. Transl. Med. 7, 288ra278 (2015); Morgan, et al., Science 314, 126-129 (2006)), with some studies showing that incremental increases in the intensity of the conditioning leads to even better engraftment and clinical outcomes (Turtle, et al., Sci. Transl. Med. 8, 355ra116 (2016); Dudley, et al., J. Clin. Oncol. 26, 5233-5239 (2008)). Consistent with this, early studies of CAR T cell therapy given without lymphodepleting conditioning saw only low-level expansion and limited persistence of transferred T cells, though admittedly these studies used first-generation CAR constructs that lacked co-stimulatory domains and contained immunogenic sequences that also contributed to poor engraftment (Pule, et al., Mol. Ther. 15, 825-833 (2007); Park, et al., Mol. Ther. 15, 825-833 (2007); Till, et al., Blood 112, 2261-2271 (2008)).

[1225] This study clearly demonstrates, however, that at least in some patients (e.g. subject 01), chemotherapy conditioning is not required for robust and sustained CAR T cell engraftment and clinical efficacy. The conditions that may have contributed to this success include the inclusion of the 4-1BB co-stimulatory domain in the CAR construct, high tumor burden with widespread availability of antigen, and the significant baseline lymphopenia in the patient population. Nonetheless, given the known beneficial effects of chemotherapy conditioning as described above, it remains likely that lymphodepletion will increase the proportion of subjects who have successful CART-BCMA expansion and persistence, and perhaps clinical responses. This question will be addressed in Cohorts 2 and 3 which receive cyclophosphamide prior to CART-BCMA cells.

[1226] Together with the previous BCMA-specific CAR T cell trial reported by the NCI (Ali, et al., Blood 128, 1688-1700 (2016)), this study validates BCMA as a highly attractive target in myeloma. This has been reinforced further by the promising pre-clinical and early clinical activity noted with bispecific antibodies and antibody-drug conjugates targeting BCMA (Tai, et al., Blood 123, 3128-3138 (2014); Hipp, et al., Leukemia 31, 1743-1751 (2017); Cohen, et al., Blood 128, 1148-1148 (2016)). In addition, preliminary reports of two other studies of BCMA-specific CAR T cells, given in conjunction with lymphodepleting chemotherapy and in less-heavily pretreated patient populations, have shown even higher response rates, several of which were durable for >1 year at time of reporting (Fan, et al., J. Clin. Oncol. 35, abstr LBA3001 (2017); Berdeja, et al., J. Clin. Oncol. 35, abstr 3010 (2017)). Importantly, none of these studies reported any unexpected off-target or off-tumor toxicity, confirming the limited normal tissue expression of BCMA, and differentiating it from other potential CAR T cell targets in myeloma (e.g. CD138, CD38, CS1/SLAMF7) with more widespread expression (Jiang, et al., Mol. Oncol. 8, 297-310 (2014); Drent, et al., Haematologica 101, 616-625 (2016); Chu, et al., Clin. Cancer Res. 20, 3989-4000 (2014)).

[1227] An important unanswered question for BCMA-targeted CAR T cells is whether there is a threshold of BCMA expression on MM cells required for optimal recognition and killing. This study did not require any specific level of BCMA as an eligibility requirement, in contrast to the 3 other reported BCMA-specific CAR T cell studies, which required at least 50% of myeloma cells to express BCMA by immunohistochemistry (IHC) or flow cytometry (Ali, et al., Blood 128, 1688-1700 (2016); Fan, et al., J. Clin. Oncol. 35, abstr LBA3001 (2017); Berdeja, et al., J. Clin. Oncol. 35, abstr 3010 (2017)). In the NCI trial, only 52/85 (62%) of pre-screened bone marrow biopsies stained for BCMA by IHC met this threshold, meaning more than a third of potentially eligible MM patients would have been excluded (Ali, et al., Blood 128, 1688-1700 (2016)). While it remains possible that this approach may enrich for patients more likely to respond, it may also exclude those who could benefit, and at least in this initial cohort in this study, responses did not correlate with baseline BCMA expression by flow cytometry (FIG. 43). Larger datasets are needed to more fully address this question. Another question relates to potential downregulation of BCMA or selection of BCMA-dim/negative variants post-CAR T cell therapy, as observed in 1 patient each to date in both this study and the NCI study (Ali, et al., Blood 128, 1688-1700 (2016)). Larger studies and longer follow-up will help determine the true frequency of this phenomenon, but it suggests that it may be a means of MM cell escape.

[1228] The primary toxicities of CAR T cells remain cytokine release syndrome (CRS) and neurotoxicity. The frequency and severity of CRS in this cohort was similar to that reported in CD19-targeted CAR T cell trials (Maude, et al., N. Engl. J. Med. 371, 1507-1517 (2014); Porter, et al., Sci. Transl. Med. 7, 303ra139 (2015)), and fortunately was abrogated with IL-6 receptor blockade therapy. Given the apparent lack of impact of tocilizumab on expansion and persistence of infused CAR T cells, studies are now underway (e.g. NCT02906371) exploring its use earlier post-infusion, even if CRS is only low-grade, which may limit the development of severe or life-threatening toxicity. Neurotoxicity has been reported in up to 50% of subjects in some CAR T cell trials (Turtle, et al., Sci. Transl. Med. 8, 355ra116 (2016); Turtle, et al., J. Clin. Invest. 126, 2123-2138 (2016); Kochenderfer, et al., J. Clin. Oncol. 33, 540-549 (2015)), and remains more of a challenge. It can occur concurrent with or subsequent to CRS, and often does not improve (or may worsen) after tocilizumab. The presence of CAR T cells within the central nervous system (CNS) (as assessed by analysis of cerebrospinal fluid) by itself does not necessarily predict for neurotoxicity, but neurotoxicity has been associated with early onset of CRS and rapid elevation of inflammatory cytokines (e.g. IL6, IFN-gamma) both within the serum and CNS, perhaps leading to increased CNS vascular permeability (Gust, et al., Cancer Discov., (2017)). Mild cases are treated supportively, with steroids usually administered for more severe cases. Fortunately, the majority of cases have been reversible and self-limiting, though fatal cases with cerebral edema have been reported (Abbasi, et al., JAMA 317, 2271 (2017); Gust, et al., Cancer Discov., (2017)). The experience in this study demonstrating rapid reversal of a PRES-like syndrome in subject 03 using cyclophosphamide suggests this may be a reasonable option to try in steroid-refractory cases, especially if symptoms are associated with extensive concomitant CAR T cell expansion.

[1229] In summary, autologous T cells expressing a fully human BCMA-specific CAR could expand and induce objective responses, even without lymphodepleting chemotherapy, in refractory MM patients. Subsequent cohorts exploring different dose levels in conjunction with cyclophosphamide conditioning will help further optimize the safety and efficacy of this approach.

### Materials and Methods

### Subjects

[1230] Subjects had multiple myeloma that had relapsed or was refractory (defined as progressing on or within 60 days of most recent therapy) after at least 3 prior lines of therapy, or 2 prior lines if dual-refractory to a proteasome inhibitor and IMiD. Other key eligibility criteria included measurable disease; an ECOG performance status of 0-2; serum creatinine ≤2.5 mg/dL or estimated creatinine clearance ≥30 ml/min; absolute neutrophil count ≥1000/μl and platelet count ≥50,000/μl (≥30,000/μl if bone marrow plasma cells are ≥50% of cellularity); SGOT ≤3× the upper limit of normal and total bilirubin ≤2.0 mg/dl (except for patients in whom hyperbilirubinemia is attributed to Gilbert's syndrome); left ventricular ejection fraction ≥45%; lack of active auto-immune disease; and lack of central nervous system involvement with myeloma. All subjects had a baseline MRI of the brain and serial evaluations by a designated study neurologist. Informed consent was obtained from each subject and the study was conducted with approval of University of Pennsylvania IRB in concordance with the Declaration of Helsinki.

### Study Design

[1231] This clinical trial was a phase 1 open-label study where the primary objective was safety. Toxicity grade was determined according to National Cancer Institute's Common Terminology Criteria for Adverse Events version 4.0, with the exception of cytokine release syndrome, which was graded as per the University of Pennsylvania CRS Grading System (Table 38), as described (Porter, et al., Sci. Transl. Med. 7, 303ra139 (2015)). The study was approved by the Recombinant DNA Advisory Committee, FDA, Abramson Cancer Center Clinical Trials Scientific Review Committee, and the Penn Institutional Biosafety Committee and Institutional Review Board. The trial was registered in clinicaltrials.gov under NCT02546167, and was conducted as described in “Protocol design and enrollment” in the Results section and in FIG. 31. Myeloma responses were assessed by updated International Myeloma Working Group criteria (Kumar, et al., Lancet Oncol. 17, e328-346 (2016), hereby incorporated herein by reference in its entirety). Data cutoff for this analysis was 9/11/17.

### CART-BCMA Manufacturing and Infusions

[1232] Peripheral blood T cells were stimulated and transduced with a lentiviral vector encoding the CAR: human anti-BCMA single chain variable fragment fused to the hinge and transmembrane domain of CD8 and the human 4-1BB and CD3z intracellular signaling domains. CART-BCMA cells were manufactured at the Clinical Cell and Vaccine Production Facility at the University of Pennsylvania, which is FACT accredited (http://www.factwebsite.org), as previously described (Porter, et al., Sci. Transl. Med. 7, 303ra139 (2015); Kalos, et al., Sci. Transl. Med. 3, 95ra73 (2011)). The frequency of CD3, CD4, and CD8 cells was determined by flow cytometry within the leukapheresis product, in the seed culture at start of manufacturing (following elutriation to reduce monocytes) (Powell, et al., Cytotherapy 11, 923-935 (2009)), and at end of manufacturing. Fold expansion and population doublings of seeded cells was measured by cell counting on a Coulter Multisizer™. CART-BCMA cells were formulated and cryopreserved until time of infusion, then administered following performance of quality control testing and quality assurance review by intravenous infusion over 3 days, with 10%, 30%, and 60% of the dose given on each day.

### Measurement of CART-BCMA Expansion

[1233] Research sample processing, freezing, and laboratory analyses were performed in the Translational and Correlative Studies Laboratory at the University of Pennsylvania, using established standard operating procedures (SOPs) for sample receipt, processing, freezing, and analysis. CART-BCMA cells were quantified from peripheral blood or bone marrow samples obtained at protocol-specified time points. Samples were collected in lavender top (K2EDTA) or red top (no additive) Vacutainer tubes (Becton Dickinson). Lavender top tubes were delivered to the laboratory within 2 hours of the sample draw. Samples were processed within 16 hours of drawing according to the established SOP. PBMCs were purified, processed, and stored in the vapor phase of liquid nitrogen. Red top tubes were processed within 2 hours of the draw including coagulation time, and serum was isolated by centrifugation, aliquoted, and stored at −80° C.

[1234] Cells were evaluated by flow cytometry directly after Ficoll-Paque processing. Immunophenotyping of PBMC was performed using about 2×10⁵ to 5×10⁵ total cells per condition depending on cell yield in samples. FMO (fluorescence minus one) secondary only controls were used for CART-BCMA and for BCMA evaluation. Reagents and protocols used for flow cytometry are described in the Supplementary Methods.

[1235] Genomic DNA was isolated directly from whole blood or marrow aspirate, and qPCR analysis was performed using ABI TaqMan technology and a validated assay to detect the integrated CAR transgene sequence as described (Kalos, et al., Sci. Transl. Med. 3, 95ra73 (2011)) using triplicates of 200 ng of genomic DNA per time point for peripheral blood and marrow samples. To determine copy number per unit DNA, an eight-point standard curve was generated consisting of 5 to 10⁶ copies of lentivirus plasmid spiked into 100 ng of non-transduced control genomic DNA. The number of copies of plasmid present in the standard curve was verified using digital qPCR with the same primer/probe set and performed on a QuantStudio 3D digital PCR instrument (Life Technologies). Each datapoint (sample and standard curve) was evaluated in triplicate with a positive Ct value in three of three replicates with percent coefficient of variation of less than 0.95% for all quantifiable values. To control for the quality of interrogated DNA, a parallel amplification reaction was performed using 20 ng of genomic DNA and a primer/probe combination specific for a non-transcribed genomic sequence upstream of the CDKN1A (p21) gene as described (Kalos, et al., Sci. Transl. Med. 3, 95ra73 (2011)). These amplification reactions generated a correction factor to adjust for calculated versus actual DNA input. Copies of transgene per microgram of DNA were calculated according to the formula: copies per microgram of genomic DNA=(copies calculated from CART-BCMA standard curve) x correction factor/(amount DNA evaluated in nanograms)×1000 ng.

### Measurement of Serum Cytokines

[1236] Human cytokine magnetic 30-plex panel (LHC6003M) was from Life Technologies.

[1237] Serum samples collected 1 day prior to CART-BCMA infusion or from baseline and at scheduled time-points out until 28 days post-infusion were cryopreserved at −80° C. Batched samples were thawed and analyzed according to the manufacturers' protocols. Assay plates were measured using a FlexMAP 3D instrument, and data acquisition and analysis were done using xPONENT software. Data quality was examined based on the following criteria. The standard curve for each analyte has a 5P R² value >0.95 with or without minor fitting using xPONENT software. To pass quality control, the results for an in-house control serum needed to be within the 95% of CI (confidence interval) derived from historical in-house control data for >25 of the tested analytes. No further tests were done on samples with results out of range low (<OOR). Samples with results that were out of range high (>OOR) or greater than two times the standard curve maximum value (SC max) were re-tested at higher dilutions. Results that passed the above quality controls or retests were reported.

### Measurement of Soluble BCMA, BAFF, and APRIL

[1238] Antibody sets for human BCMA (DY193), APRIL (DY884B) and BAFF (DT124-05) were from R&D Systems. ELISA bead-strip and 4-column reservoir (SOW-A16735) were from Assay Depot. ELISA substrate ADHP (Ser. No. 10/010,469) was from Cayman Chemical. Assay plates (OX1263) were from E&K Scientific. All ELISA reagents were prepared according to the protocols for DuoSet ELISA except for Color Reagent B, which was supplemented with ADHP at 100 uM. Due to limited volumes of sera and lack of availability of a Luminex assay for BCMA, APRIL and BAFF, the three analytes were measured using ELISA bead-strips. Instead of coating the capture antibody (cAB) to the wells of an ELISA plate, it was coated on the surfaces of macrospheres, which enabled the measurement of all three analytes using 100 ul of serum. Assays were set up using bead-strips in assay plates based on an assay map following the protocol for antibody sets. At the end of the assay, one substrate plate per 12 bead-strips was prepared by adding 100 ul/well of substrate solution (1:1 of color reagent A and ADHP). Each bead-strip was placed in one column of the substrate plate according to the assay map. Color development was for 10 to 30 minutes. Plates were read on a FLUO STAR OMEGA instrument. Data quality control was performed as described for Luminex data.

### Assessment of Bone Marrow Myeloma Cells, Including BCMA Expression

[1239] Flow cytometry assessment of bone marrow aspirate material was performed directly on aspirate following a brief ammonium chloride red blood cell lysis step. The procedure was adapted from the EuroFlow protocol as described in (Flores-Montero, et al., Leukemia 31, 2094-2103 (2017)). Briefly, up to 2 mls of bone marrow aspirate was diluted with 48m1s of Pharm Lyse solution (BD Biosciences Cat #555899) and incubated for 15 minutes at room temperature on a shaking device. The cells were then collected by centrifugation for 10 minutes at 800 g, washed twice with flow cytometry buffer (PBS with 1% fetal bovine serum), stained with L/D Aqua viability dye (Thermo Fisher Cat # L34957). Surface staining was done with a mixture of antibodies to CD45, CD19, CD138, CD38, CD14, CD56, CD20, CD3, CD269 (BCMA), CD274 (PD-L1). FMO (fluorescence minus one) secondary only controls were used for BCMA evaluation. Aliquots of normal donor PBMC cells were stained in parallel as controls. The cells were then washed before permeabilization/fixation using Cytofix/Cytoperm reagent (BD Biosciences) for 20 minutes at room temperature, washed, and stained with a mixture of antibodies to kappa and lambda immunoglobulin light chains. The samples were then washed before resuspension in PBS and acquisition on a 17-color LSR Fortessa Special Order Research Product flow cytometer (BD) equipped with a violet, blue, green, and red laser. List mode files were analyzed using either FlowJo (Treestar) or FCS Express.

### Statistics

[1240] Statistical analysis of the study is primarily descriptive due to the pilot nature of the trial and small sample size of patients. Kaplan-Meier method was used to estimate duration of response, progression-free and overall survival and the associated median survival times. The Mann-Whitney test was used to evaluate significance of the association between response and peak CART-BCMA expansion, area under the curve for expansion over the first 28 days (AUC-28), baseline soluble BCMA levels, and baseline BCMA expression on MM cells. Spearman correlations were used to measure the correlations between two continuous variables. Significance of the Spearman correlation against the null hypothesis of no correlation was computed based on permutation. Analysis was performed using Graphpad Prism version 6.0.

TABLE 30
Subject characteristics

| Characteristic (n = 9) | Median (range) or % | |
|---|---|---|
| Age | 57 | (44-70) |
| Gender | 67% male; 33% female | |
| Median time from diagnosis (years) | 4.9 | (1.8-9.6) |
| High-risk cytogenetics* | 100% | |
| Del 17p or TP53 mutation | 67% | |
| Prior lines of therapy | 9 | (4-11) |
| Len/Bort/Pom/Carf/Dara (% exposed) | 100%/100%/100%/100%/44% | |
| Len/Bort/Pom/Carf/Dara (% refractory) | 78%/89%/89%/89%/44% | |
| % Dual-/% Quad-/% Penta-refractory | 100%/56%/33% | |
| Autologous SCT | 78% | |
| Extramedullary disease | 22% | |
| % Bone marrow plasma cells | 80 | (15-95) |
| Day 0 absolute lymphocyte count | 500 | (200-1420) |
| (cells/μL) | | |
| Day 0 absolute CD3 count (cells/μL) | 258 | (117-1354) |
| Day 0 LDH (xx/xx) | 175 | (109-385) |
| Day 0 serum creatinine (mg/dL) | 1.58 | (0.83-2.87) |
| Day 0 hemoglobin (g/dL) | 8.7 | (6.4-11.3) |
| Day 0 platelets (×10³/ uL) | 100 | (13-221) |

*Includes complex karyotype, gain 1q, deletion 17p, and/or t(4; 14).
Bort = bortezomib; Carf = carfilzomib; Dara = daratumumab; Del = deletion; Dual-refractory = refractory to both a proteasome inhibitor (PI) and immunomodulatory agent (IMiD); LDH = lactate dehyrdrogenase; Len = lenalidomide; Penta-refractory = refractory to 2 Pls, 2 IMiDs, and dara; Pom = pomalidomide; Quad-refractory = refractory to 2 Pls and 2 IMiDs; SCT = stem cell transplant.

TABLE 31
Grade 3 or higher adverse events

| | Grade 3 | Grade 4 | Grade 5 | All |
|---|---|---|---|---|
| Event | n (%) | n (%) | n (%) | n (%) |
| Hypophosphatemia | 4 (44%) | 0 | 0 | 4 (44%) |
| Cytokine release syndrome | 2 (22%) | 1 (11%) | 0 | 3 (33%) |
| Thrombocytopenia | 2 (33%) | 1 (11%) | 0 | 3 (33%) |
| Neurotoxicity* | 0 | 2 (22%) | 0 | 2 (22%) |
| Anemia | 2 (22%) | 0 | 0 | 2 (22%) |
| Lung infection | 0 | 2 (22%) | 0 | 2 (22%) |
| Neutropenia | 0 | 2 (22%) | 0 | 2 (22%) |
| Hypocalcemia | 1 (11%) | 1 (11%) | 0 | 2 (22%) |
| Hypokalemia | 2 (22%) | 0 | 0 | 2 (22%) |
| Death NOS** | 0 | 0 | 1 (11%) | 1 (11%) |
| Fatigue | 1 (11%) | 0 | 0 | 1 (11%) |
| Infection-other (candidemia) | 0 | 1 (11%) | 0 | 1 (11%) |
| Urinary tract infection | 1 (11%) | 0 | 0 | 1 (11%) |
| Alkaline phosphatase elevated | 1 (11%) | 0 | 0 | 1 (11%) |
| AST elevated | 1 (11%) | 0 | 0 | 1 (11%) |
| Fibrinogen decreased | 1 (11%) | 0 | 0 | 1 (11%) |
| Lymphopenia | 0 | 1 (11%) | 0 | 1 (11%) |
| Leukopenia | 0 | 1 (11%) | 0 | 1 (11%) |
| Hyponatremia | 1 (11%) | 0 | 0 | 1 (11%) |
| Pleural effusion | 1 (11%) | 0 | 0 | 1 (11%) |
| Hypertension | 1 (11%) | 0 | 0 | 1 (11%) |

n = number of subjects who had the event. Highest grade toxicity experienced by subject is reported in table.
*Neurotoxicity includes 1 subject with grade 3 seizures, grade 4 delirium, and grade 4 reversible posterior leukoencephalopathy syndrome (RPLS), also known as posterior reversible encephalopathy syndrome (PRES); and 1 subject with grade 3 delirium and grade 4 encephalopathy.
**Death NOS (not otherwise specified) in subject 08 with candidemia and rapidly progressive myeloma; family chose to pursue comfort measures only.

### Supplementary Methods

### Reagents and Protocols for Flow Cytometry

[1241] Antibodies for T cell detection panels were anti-CD45 V450 (clone HI30), anti-CD14 V500 (clone M5E2), anti-CD56 Ax488 (clone B159), anti-CD4 PerCP-Cy5.5 (clone RPA-T4), anti-CD8 APC-H7 (clone SK1) (all from BD Bioscience). Also, anti-CD3 BV605 (clone OKT3), anti-HLA-DR BV711 (clone L243), anti-CD19 PE-Cy7 (clone H1B19) were used from Biolegend. CART-BCMA expression was assessed by using a bis-biotinylated BCMA-Fc recombinant protein and the secondary staining reagent Streptavidin-PE from BD Bioscience (cat #554061). Cells were resuspended in 100 μL PBS containing 1% fetal bovine serum, 0.02% sodium azide and bis-biotinylated BCMA-Fc and incubated for 30 min on ice, washed, resuspended in 100 μL PBS containing 1% fetal bovine serum, 0.02% sodium azide, surface antibodies and SA-PE, and incubated for 30 minutes on ice, washed, resuspended in 250 ul PBS containing 1% fetal bovine serum and 0.02% sodium azide and acquired using a Fortessa flow cytometer equipped with a violet (405 nm), blue (488 nm), a green (532 nm), and a red (628 nm) laser. Data were analyzed using FlowJo software (Version 10, Treestar). Compensation values were established using eBiosciene UltraComp eBeads (eBioscience cat #01-222-42) and DIVA software.

TABLE 32
Individual subject characteristics

| | | | | Yrs | Iso- | Karyo- | | | # | Last tx before |
|---|---|---|---|---|---|---|---|---|---|---|
| Sub. | Age | Sex | Race | from Dx | type | type | FISH | Mutation | lines* | pheresis, infusion** |
| 01 | 66 | M | white | 9.6 | IgGK | 46XY | +11, | NRAS, | 11 | Pom/Dex |
| | | | | | | | −16q, | TP53, | | Pom/Dex |
| | | | | | | | −17p | TP53 | | |
| 02 | 68 | M | white | 6.3 | IgAK | 46XY | +1q, | n/a | 9 | Carfilz/Len/Dex |
| | | | | | | | +4p, | | | Carfilz/Cyclo/Dex |
| | | | | | | | −17p | | | |
| 03 | 54 | F | white | 3.1 | IgAE | n/a | +1q, | n/a | 4 | D-PACE |
| | | | | | | | t(4; 14), | | | D-AC |
| | | | | | | | −16q | | | |
| 07 | 44 | M | white | 1.8 | K | n/a | +1q, −4, | NRAS, | 9 | Carfilz/Pano |
| | | | | | | | +11, | TP53 | | Pom/Dex-ACE |
| | | | | | | | −14, −16 | | | |
| 08 | 70 | M | white | 3.3 | IgAL | complex | +1q, | n/a | 6 | Carfilz/Pom/Dex |
| | | | | | | | −1p, −4, | | | Carfilz/Pom/Dex |
| | | | | | | | −17p | | | |
| 09 | 61 | M | white | 6.6 | K | 46XY | t(11; 14), | none | 9 | Daratumumab |
| | | | | | | | −16q, | | | Pulse Dex |
| | | | | | | | −17p | | | |
| 10 | 47 | M | white | 4.9 | IgGL | n/a | +1q, | KRAS, | 7 | Pom/Dex |
| | | | | | | | t(11; 14) | SF3B1 | | Pom/Cyclo/Dex + |
| | | | | | | | | | | plasma exchange |
| 11 | 57 | F | AA | 6.3 | IgGL | 46XX | −1q, | n/a | 10 | VDT-PACE |
| | | | | | | | t(4; 14), | | | VDT-PACE |
| | | | | | | | −17p | | | |
| 15 | 51 | F | Asian | 4.7 | IgAK | 46XX | +1q, | NRAS, | 7 | Pembro/Pom/Dex |
| | | | | | | | t(11; 14) | KRAS, | | Pom/Dex |
| | | | | | | | | BIRC3, | | |
| | | | | | | | | KIT | | |

*A line of therapy was defined as per IMWG criteria. Radiation was not counted as a line.
**Most recent therapy received before T cell collection (“pheresis” - top line) and CART-BCMA infusion (“infusion” - bottom line). All therapy was held for at least 2 weeks prior to pheresis and again for at least 2 weeks prior to infusion. Carfilz = carfilzomib; cyclo = cyclophosphamide; D-AC = dexamethasone + infusional doxorubicin and cyclophosphamide; D-PACE = dexamethasone + infusional cisplatinum, doxorubicin, cyclophosphamide, and etoposide; Dex = dexamethasone; Dx = diagnosis; Len = lenalidomide; Pano = panobinostat; Pembro = pembrolizumab; Pom = pomalidomide; Pom/Dex-ACE = pomalidomide, dexamethasone + infusional doxorubicin, cyclophosphamide, and etoposide; Tx = treatment; VDT-PACE = bortezomib, dexamethasone, thalidomide + infusional cisplatinum, doxorubicin, cyclophosphamide, and etoposide; Yrs = years.

TABLE 33
CART-BCMA manufacturing and product details

| | | | | | | | | | | Total | |
|---|---|---|---|---|---|---|---|---|---|---|---|
| | | | % CD3 + | CD4:CD8 | % CD3 + | CD4:CD8 | | | Trans | #CAR | |
| | % CD3 + | CD4:CD8 | in seed | in seed | at | at | Fold | Pop | Eff | given | Best |
| Sub. | in aph | in aph | culture | culture | harvest | harvest | exp | dblgs | (%) | (×10⁸) | response |
| 01 | 28.4 | 3.20 | 52.6 | 2.04 | 98.4 | 2.40 | 43.5 | 4.54 | 9.6 | 2.0* | sCR |
| 02 | 41.9 | 0.80 | 63 | 0.40 | 69.1 | 1.31 | 12.7 | 3.67 | 18.2 | 5.0 | MR |
| 03 | 25.2 | 2.33 | 58.4 | 2.47 | 97.6 | 1.72 | 17.9 | 4.16 | 25.9 | 2.0* | VGPR |
| 07 | 10.2 | 2.18 | 20.3 | 1.47 | 94.9 | 1.60 | 38.9 | 5.28 | 24.2 | 5.0 | PR |
| 08 | 9.2 | 0.62 | 20.8 | 0.31 | 92.5 | 2.99 | 7.9 | 2.98 | 22.7 | 5.0 | PD |
| 09 | 54.6 | 0.77 | 86.8 | 0.49 | 87.5 | 1.69 | 10.0 | 3.33 | 22.2 | 5.0 | SD |
| 10 | 19.2 | 1.09 | 47.3 | 1.07 | 96.7 | 1.32 | 11.5 | 3.52 | 16.5 | 1.77 | PD |
| 11 | 5.56 | 1.14 | 21.4 | 0.81 | 96.9 | 1.20 | 8.7 | 3.11 | 19.4 | 5.0 | MR |
| 15 | 39.8 | 0.82 | 90.8 | 0.71 | 96 | 1.24 | 22.6 | 4.50 | 33.3 | 2.0* | VGPR |

Frequency of total CD3+, CD3+CD4+, and CD3+CD8+ cells was assessed by flow cytometry in the apheresis product, at the start of manufacturing (“seed culture,” after elutriation), and at the end of manufacturing (“at harvest”). Aph = apheresis product; fold exp = fold expansion; pop dblgs = population doublings; trans eff = transduction efficiency. MR = minimal response; PD = progressive disease; PR = partial response; sCR = stringent complete response; SD = stable disease; VGPR = very good partial response
*Subjects 01, 03, and 15 received only 40% of planned dose due to fevers/early CRS.

TABLE 34
Individual subject adverse events

| Sub. | Grade 1 | Grade 2 | Grade 3 | Grade 4 | Grade 5 |
|---|---|---|---|---|---|
| 01 | Dry eye | DIC | Anemia | Lymphopenia | |
| | Dry mouth | Vertigo | Fatigue | | |
| | Flu-like symptoms | Ileus | CRS | | |
| | Metabolism disorder - | Nausea | Alk phos increased | | |
| | other (iron | Vomiting | AST increased | | |
| | deficiency) | Fever | Hypocalcemia | | |
| | Myalgia | Creatinine increased | Hypokalemia | | |
| | Headache | Thrombocytopenia | Hypophosphatemia | | |
| | Ischemia | Musculoskeletal | | | |
| | cerebrovascular | disorder - other | | | |
| | Nervous system | (generalized muscle | | | |
| | disorder - other | aches) | | | |
| | (confusion) | Urinary retention | | | |
| | Vascular disorder - | Respiratory disorder - | | | |
| | other (edema) | other (pulmonary | | | |
| | | edema and atelectasis) | | | |
| | | Skin/SQ disorder - | | | |
| | | other (skin tear) | | | |
| | | Hypertension | | | |
| 02 | Sinus tachycardia | | Thrombocytopenia | | |
| | Gastrointestinal | | | | |
| | disorders - other | | | | |
| | (loose stool) | | | | |
| | Nausea | | | | |
| | Fatigue | | | | |
| | CRS | | | | |
| | Dizziness | | | | |
| | Headache | | | | |
| | Respiratory disorder - | | | | |
| | other (nasal and | | | | |
| | sinus congestion, | | | | |
| | cough) | | | | |
| 03 | Sinus bradycardia | SVT | CRS | Neutropenia | |
| | Ear disorder - other | Fatigue | UTI | Leukopenia | |
| | (ears feel full, hard | Infection - other (S. | Fibrinogen | Hypocalcemia | |
| | to hear) | mitis/S. oralis | decreased | RPLS | |
| | Eye disorder - other | bacteremia) | Hypophosphatemia | Delirium | |
| | (difficulty reading) | Upper respiratory | Seizure | | |
| | Constipation | infection | Pleural effusion | | |
| | Edema | Lymphopenia | Hypertension | | |
| | Fever | Hypernatremia | | | |
| | Hypokalemia | Musculoskeletal | | | |
| | Hypomagnesemia | disorder - other | | | |
| | Bone pain | (deconditioning, pain | | | |
| | Concentration | base of skull) | | | |
| | impairment | Intracranial | | | |
| | Headache | hemorrhage | | | |
| | Hoarseness | Respiratory disorder - | | | |
| | Skin/SQ disorder - | other (post-nasal drip) | | | |
| | other (ecchymosis) | Hypotension | | | |
| 07 | Skin/SQ disorder - | CRS | Anemia | | |
| | other (rash on face) | Dyspepsia | Hypokalemia | | |
| | | Hypoalbuminemia | Hyponatremia | | |
| | | Hypocalcemia | | | |
| 08 | Sinus tachycardia | | Lung infection | CRS | Death |
| | General disorder - | | Delirium | Thrombocytopenia | NOS |
| | other (rigors) | | | Encephalopathy | |
| | | | | Infection - other | |
| | | | | (fungemia) | |
| 09 | Constipation | Anemia | | | |
| | Chills | Pericardial effusion | | | |
| | Fatigue | CRS | | | |
| | Thrombocytopenia | Neutropenia | | | |
| | Anorexia | Hypocalcemia | | | |
| | Hypokalemia | Headache | | | |
| 10 | Chills | Thromobocytopenia | | | |
| | Fever | | | | |
| 11 | Nausea | CRS | Hypophosphatemia | | |
| | Fatigue | Infection - other | | | |
| | Thrombocytopenia | (Clostridium difficile) | | | |
| | Headache | Hypocalcemia | | | |
| | Respiratory disorder - | | | | |
| | other (cough, | | | | |
| | congestion) | | | | |
| 15 | Hypocalcemia | Fatigue | Thrombocytopenia | Neutropenia | |
| | Headache | CRS | | | |
| | Cough | Infection - other | | | |
| | Dyspnea | (positive test for Shiga | | | |
| | | toxin) | | | |
| | | Hypotension | | | |

All events regardless of attribution are listed. If an event occurred more than once in same patient, highest grade is reported.
Alk phos = alkaline phosphatase; AST = aspartate aminotransferase; CRS = cytokine release syndrome; DIC = disseminated intravascular coagulation; NOS = not otherwise specified; RPLS = reversible posterior leukoencephalopathy syndrome; SQ = subcutaneous; SVT = supraventricular tachycardia; UTI = urinary tract infection

TABLE 35
Characteristics of peripheral blood CART-BCMA + cells at peak expansion

| | Day of | % CAR+ | % CAR+ | % CAR+ | % HLADR+ | |
|---|---|---|---|---|---|---|
| Sub. | peak | of CD3+ | of CD4+ | of CD8+ | of CAR+ | Best response |
| 01 | 10 | 89.5 | 8.6 | 92.3 | 97 | sCR |
| 02 | 9 | 2.8 | 1.4 | 5.0 | 82 | MR |
| 03 | 14 | 76.2 | 13.7 | 85.9 | 97 | VGPR |
| 07 | 10 | 29.2 | 7.3 | 39.3 | 89 | PR |
| 08 | 16 | 9.3 | 0.4 | 16.9 | 95 | PD |
| 09 | 11* | * | * | * | * | SD |
| 10 | 30 | 1.9 | 0.1 | 2.0 | 21 | PD |
| 11 | 8 | 18.2 | 14.6 | 25.2 | 94 | MR |
| 15 | 10 | 28.1 | 6.3 | 51.0 | 96 | VGPR |

CART-BCMA cells were assessed by flow cytometry as in FIG. 38. At day of peak expansion, the frequency of CAR+ cells within CD3+, CD4+, and CD8+ populations are listed. Activation status at peak expansion (as measured by % of CAR+ cells expressing HLA-DR) is also shown. MR = minimal response; PD = progressive disease; PR = partial response; sCR = stringent complete response; SD = stable disease; VGPR = very good partial response
*Peak determined by qPCR; CAR+ cells not detectable by flow.

TABLE 36
CART-BCMA engraftment by qPCR in blood, bone marrow, and other sites

| | Day 28 | Day 28 | 3 month | 3 month | |
|---|---|---|---|---|---|
| Sub. | blood | BM | blood | BM | Other (site, day) |
| 01 | 23447.33 | 10458.66 | 4373.95 | n/a | n/a |
| 02 | 454.57 | 383.62 | 334.90 | n/a | n/a |
| 03 | 220081.08* | 109964.97* | 9517.67 | 9934.97 | CSF, D4: 3285.88 |
| | | | | | CSF, D16: 158038.74 |
| | | | | | Pleural fluid, D8: 23941.97 |
| | | | | | Pleural fluid, D18: 144516.62 |
| | | | | | BM, D164: 105.81 |
| 07 | 1757.60 | 2140.31 | n/a | n/a | n/a |
| 08 | n/a | n/a | n/a | n/a | n/a |
| 09 | 32.15 | 16.75 | n/a | n/a | n/a |
| 10 | 62.64 | 0 | n/a | n/a | n/a |
| 11 | 731.44 | | n/a | n/a | n/a |
| 15 | 724.49 | 1084.16 | 32.58 | 99.48 | n/a |

CART-BCMA levels (copies/μg genomic DNA) were generally comparable in blood and marrow at tested timepoints. CART-BCMA was found at high levels in CSF and pleural fluid of subject 03.
BM = bone marrow; CSF = cerebrospinal fluid.
*Assays performed on day 45.

TABLE 37
Details of BCMA expression on myeloma cells

| | | | | | | Post-Tx | |
|---|---|---|---|---|---|---|---|
| | Pre-tx | Pre-tx | Pre-tx | Post-tx | Post-tx | BCMA | Best |
| Sub. | % BCMA+ | FMO MFI | BCMA MFI | % BCMA+ | FMO MFI | MFI | response |
| 01 | 95 | 568 | 10864 | n/a | n/a | n/a | sCR |
| 02 | 93 | 355 | 2375 | 97 | 483 | 3254 | MR |
| 03 | 84 | 265 | 1873 | 19 | 78 | 268 | VGPR |
| | | | | (d 164) | (d 164) | | |
| 07 | n/a | n/a | n/a | 84 | 273 | 1426 | PR |
| 08 | 99 | 124 | 6859 | n/a | n/a | n/a | PD |
| 09 | 28 | 50 | 103 | 93.7 | 204 | 1116 | SD |
| 10 | 83 | 192 | 1998 | 99 | 54 | 2140 | PD |
| 11 | 81 | 332 | 1844 | 62 | 49 | 831 | MR |
| 15 | 99 | 249 | 24842 | 100 | 362 | 30685 | VGPR |
| | | | | | (d 90) | (d 90) | |

Bone marrow myeloma cells were gated and BCMA expression analyzed. The % of myeloma cells expressing BCMA, as well as the mean fluorescence intensity (MFI) for BCMA and FMO negative control are depicted, n/a = not available. Pre-tx = pre-treatment. Post-tx = post-treatment, at day 28 timepoint unless otherwise specified.

TABLE 38
Penn grading system for Cytokine Release Syndrome (CRS)
University of Pennsylvania CRS Toxicity Grade

| 1 | 2 | 3 | 4 | 5 |
|---|---|---|---|---|
| Mild reaction: | Moderate reaction | More severe reaction: | Life-threatening | Death |
| Treated with | requiring IV fluids | Hospitalization required for | complications | |
| supportive | or parenteral | management of symptoms | such as | |
| care such as | nutrition; some | related to organ dysfunction | hypotension | |
| anti-pyretics, | signs of organ | including grade 4 LFTs or | requiring high | |
| anti-emetics | dysfunction (i.e., | grade 3 creatinine related to | dose pressors or | |
| | grade 2 creatinine | CRS and not attributable to | hypoxia | |
| | or grade 3 liver | any other conditions. This | requiring | |
| | function tests | excludes management of fever | mechanical | |
| | [LFTs] related to | or myalgias. Includes | ventilation. | |
| | CRS and not | hypotension treated with | | |
| | attributable to any | IVFs* or low-dose pressors, | | |
| | other condition). | coagulopathy requiring fresh | | |
| | Hospitalization for | frozen plasma (FFP) or | | |
| | management of | cryoprecipitate, and hypoxia | | |
| | CRS related | requiring supplemental oxygen | | |
| | symptoms including | (nasal cannula oxygen, high | | |
| | fevers with | flow oxygen, Continuous | | |
| | associated | Positive Airway Pressure | | |
| | neutropenia. | [CPAP] or Bilateral Positive | | |
| | | Airway Pressure [BiPAP]). | | |
| | | Patients admitted for | | |
| | | management of suspected | | |
| | | infection due to fevers and/or | | |
| | | neutropenia may have grade 2 | | |
| | | CRS. | | |

*Defined as hypotension requiring multiple fluid boluses for blood pressure support.

### Example 6: BCMA Surface Expression in B Cell Malignancies that are not Multiple Myeloma

### Materials and Methods

[1242] The following activated B cell subtype diffuse large B cell lymphoma (DLBCL) cell lines were tested: HBL-1, Oci-Ly3 and TMD-8. Additionally, the following germinal center B cell (GCB) subtype DLBCL lines were tested: SuDHL-4, SuDHL-6, and SuDHL-10. The multiple myeloma (MM) lines U266 and KMS11 served as positive controls and the acute lymphoblastic leukemia line Nalm6 as well as the chronic myelogenous leukemia (CML) line K562 were used as negative controls. Cells were stained with a PE-labeled anti-BCMA antibody (Biolegend, cat #357504) at 1:50 dilution. The antibody binding capacity (ABC) was determined with the Quantum Simply Cellular quantification kit (Bangs Laboratories, cat #815) according to the manufacturer's protocol. Cells were analyzed on a BD Fortessa flow cytometer and data was analyzed using FlowJo.

### Results

[1243] FIG. 44A shows the histograms of BCMA expression and in FIG. 44B, the antibody binding capacity for each cell line is plotted. Both positive control lines showed high BCMA expression as seen in the histograms and by quantification (FIGS. 44A and 44B). All other lines showed significantly lower BCMA expression. However, all DLBCL lines tested, with the exception of Oci-Ly3, were distinctly BCMA positive. HBL-1 and SuDHL-6 showed the highest expression with an antibody binding capacity of >5,000.

### Example 7: Predictors of T Cell Expansion and Clinical Responses Following B-Cell Maturation Antigen-Specific Chimeric Antigen Receptor T Cell Therapy (CART-BCMA) for Relapsed/Refractory Multiple Myeloma (MM)

[1244] Background: Relapsed/refractory (rel/ref) MM is associated with progressive immune dysfunction, including reversal of CD4:CD8 T cell ratio and acquisition of terminally-differentiated T cell phenotypes. BCMA-directed CAR T cells have promising activity in MM, but the factors that predict for robust in vivo expansion and responses are not known. In a phase 1 study of CART-BCMA (autologous T cells expressing a human BCMA-specific CAR with CD3ι/4-1BB signaling domains) in refractory MM patients (median 7 priors, 96% high-risk cytogenetics), partial response (PR) or better was observed in 12/25 (47%) (Cohen et al, ASH 2017, #505, herein incorporated by reference in its entirety). Recently, it was demonstrated in CLL patients receiving CD19-directed CAR T cells that certain T cell phenotypes prior to generation of the CAR T product were associated with improved in vivo expansion and clinical outcomes (Fraietta et al, Nat Med 2018, herein incorporated by reference in its entirety). This study thus sought to identify pre-treatment clinical or immunological features associated with CART-BCMA expansion and/or response.

[1245] Methods:

[1246] Three cohorts were enrolled: 1) 1-5×10⁸ CART cells alone; 2) cyclophosphamide (Cy) 1.5 g/m²+1-5×10⁷ CART cells; and 3) Cy 1.5 g/m²+1-5×10⁸ CART cells. Phenotypic analysis of peripheral blood (PB) and bone marrow (BM) mononuclear cells, frozen leukapheresis aliquots, and phenotype and in vitro kinetics of CART-BCMA growth during manufacturing were performed by flow cytometry. CART-BCMA in vivo expansion was assessed by flow cytometry and qPCR. Responses were assessed by IMWG criteria.

[1247] Results:

[1248] Responses (≥PR) were seen in 4/9 pts (44%, 1 sCR, 2 VPGR, 1 PR) in cohort 1; ⅕ (20%, 1 PR) in cohort 2; and 7/11 (64%, 1 CR, 3 VGPR, 3 PR) in cohort 3. As of 7/9/2018, 3/25 (12%) remain progression-free at 11, 14, and 32 months post-infusions. As previously described, responses were associated with both peak in vivo CART-BCMA expansion (p=0.002) as well as expansion over first month post-infusion (AUC-28, p=0.002). No baseline clinical or MM-related characteristic was significantly associated with expansion or response, including age, isotype, time from diagnosis, # prior therapies, being quad- or penta-refractory, presence of del 17p or TP53 mutation, serum hemoglobin, BM MM cell percentage, MM cell BCMA intensity, or soluble BCMA concentration. Treatment regimen given before leukapheresis or CART-BCMA infusions also had no predictive value. It was found, however, that higher CD4:CD8 T cell ratios within the leukapheresis product were associated with greater in vivo CART-BCMA expansion (Spearman's r=0.56, p=0.005) and clinical response (PR or better; p=0.014, Mann-Whitney). In addition, and similar to CLL data, it was found that a higher frequency of CD8 T cells within the leukapheresis product with an “early-memory” phenotype of CD45RO−CD27+ was also associated with improved expansion (Spearman's r=0.48, p=0.018) and response (p=0.047). Analysis of manufacturing data confirmed that higher CD4:CD8 ratio at culture start was associated with greater expansion (r=0.41, p=0.044) and, to a lesser degree, responses (p=0.074), whereas absolute T cell numbers or CD4:CD8 ratio in final CART-BCMA product was not (p=NS). In vitro expansion during manufacturing did associate with in vivo expansion (r=0.48, p=0.017), but was not directly predictive of response. At the time of CART-BCMA infusion, the frequency of total T cells, CD8+ T cells, NK cells, B cells, and CD3+CD56+ cells within the PB or BM was not associated with subsequent CART-BCMA expansion or clinical response; higher PB and BM CD4:CD8 ratio pre-infusion correlated with expansion (r=0.58, p=0.004 and r=0.64, p=0.003, respectively), but not with response.

[1249] Conclusions:

[1250] In this study, it was found that CART-BCMA expansion and responses in heavily-pretreated MM patients were not associated with tumor burden or other clinical characteristics, but did correlate with certain immunological features prior to T cell collection and manufacturing, namely preservation of normal CD4:CD8 ratio and increased frequency of CD8 T cells with a CD45RO−CD27+ phenotype. This suggests that patients with less dysregulated immune systems may generate more effective CAR T cell products in MM, and has implications for optimizing patient selection, timing of T cell collection, and manufacturing techniques to try to overcome these limitations in MM patients.

### Example 8: Clinical Predictors of T Cell Fitness for CAR T Cell Manufacturing and Efficacy in Multiple Myeloma

[1251] Introduction:

[1252] The optimal clinical setting and cell product characteristics for chimeric antigen receptor (CAR) T cell therapy in multiple myeloma (MM) are uncertain. In CLL patients treated with anti-CD19 CAR T cells (CART19), prevalence of an early memory (early-mem) T cell phenotype (CD27+CD45RO−CD8+) at time of leukapheresis was predictive of clinical response independently of other patient- or disease-specific factors and was associated with enhanced capacity for in vitro T cell expansion and CD19-responsive activation (Fraietta et al. Nat Med 2018, herein incorporated by reference in its entirety). T cell fitness is therefore a major determinant of response to CAR T cell therapy. In this study, leukapheresis samples from MM patients obtained at completion of induction therapy (post-ind) was compared with those obtained in relapsed/refractory (rel/ref) patients for frequency of early-mem T cells, CD4/CD8 ratio, and in vitro T cell expansion.

[1253] Methods:

[1254] Cryopreserved leukapheresis samples were analyzed for the percentage of early-mem T cells and CD4/CD8 ratio by flow cytometry and in vitro expansion kinetics during anti-CD3/anti-CD28 bead stimulation. Post-ind samples were obtained between 2007 and 2014 from previously reported MM trials in which ex-vivo-expanded autologous T cells were infused post-ASCT to facilitate immune reconstitution (NCT01245673, NCT01426828, NCT00046852); rel/ref samples were from MM patients treated in a phase-one study of CART-BCMA (NCT02546167).

[1255] Results:

[1256] The post-ind cohort includes 38 patients with median age 55y (range 41-68) and prior exposure to lenalidomide (22), bortezomib (21), dexamethasone (38), cyclophosphamide (8), vincristine (2), thalidomide (8), and doxorubicin (4); median time from first systemic therapy to leukapheresis was 152 days (range 53-1886) with a median of 1 prior line of therapy (range 1-4). The rel/ref cohort included 25 patients with median age 58y (range 44-75), median 7 prior lines of therapy (range 3-13), and previously exposed to lenalidomide (25), bortezomib (25), pomalidomide (23), carfilzomib/oprozomib (24), daratumumab (19), cyclophosphamide (25), autologous SCT (23), allogeneic SCT (1), and anti-PD1 (7). Median marrow plasma cell content at leukapheresis was lower in the post-ind cohort (12.5%, range 0-80, n=37) compared to the rel/ref cohort (65%, range 0-95%). Percentage of early-mem T cells was higher in the post-ind vs rel/ref cohort (median 43.9% vs 29.0%, p=0.001, FIG. 45A). Likewise, CD4/CD8 ratio was higher in the post-ind vs rel/ref cohort (median 2.6 vs 0.87, p<0.0001, FIG. 45B). Magnitude of in vitro T cell expansion during manufacturing (measured as population doublings by day 9, or PDL9), which correlated with response to CART19 in CLL, was higher in post-ind vs rel/ref cohort (median PDL9 5.3 vs 4.5, p=0.0008, FIG. 45C). Pooling data from both cohorts, PDL9 correlated with both early-mem T cell percentage (Spearman's rho 0.38, multiplicity adjusted p=0.01) and CD4/CD8 ratio (Spearman's rho 0.42, multiplicity adjusted p=0.005). Within the post-ind cohort, there was no significant association between early-mem T cell percentage and time since MM diagnosis, duration of therapy, exposure to specific therapies (including cyclophosphamide, bortezomib, or lenalidomide), or bone marrow plasma cell content at time of apheresis. However, in the post-ind cohort, there was a trend of toward lower percentage early-mem phenotype (29% vs 49%, p=0.07) and lower CD4/CD8 ratio (median 1.4 vs 2.7, p=0.04) among patients who required >2 lines of therapy prior to apheresis (n=3) compared to the rest of the cohort (n=35).

[1257] Conclusion:

[1258] In MM patients, frequency of the early-mem T cell phenotype, a functionally validated biomarker of fitness for CAR T cell manufacturing, was significantly higher in leukapheresis products obtained after induction therapy compared to the relapsed/refractory setting, as was CD4/CD8 ratio and magnitude of in vitro T cell expansion. This result suggests that CAR T cells for MM would yield better clinical responses at early points in the disease course, at periods of relatively low disease burden and before exposure to multiple lines of therapy.

### Example 9: PD-1 Inhibitor Combinations as Salvage Therapy for Relapsed/Refractory Multiple Myeloma (MM) Patients Progressing after BCMA-Directed CART Cells

[1259] Background:

[1260] Autologous T cells expressing a chimeric antigen receptor (CAR) specific for B-cell maturation antigen (CART-BCMA cells) show activity in refractory MM, but relapses remain common. Anti-PD-1 antibodies (Abs) augment CART cell activity pre-clinically, and induced CART cell re-expansion and responses in DLBCL patients progressing after CD19-specific CART cells (Chong et al, Blood 2017, herein incorporated by reference in its entirety). The IMiDs lenalidomide (len) and pomalidomide (pom) may enhance efficacy, but also toxicity, of both CART cells and PD-1 inhibitors in MM. Elotuzumab (do) has clinical anti-MM activity in combination with IMiDs and dexamethasone (dex), and synergizes with anti-PD-1 Ab in pre-clinical models.

[1261] Methods:

[1262] Outcomes of 25 subjects enrolled in a phase 1 study of CART-BCMA cells in relapsed/refractory MM were previously described (Cohen et al, ASH 2017, #505, herein incorporated by reference in its entirety). Five subjects were identified and retrospectively reviewed who progressed after CART-BCMA and received a PD-1 inhibitor (pembrolizumab (pembro)) combination as their next therapy. Responses were assessed by IMWG criteria. CART-BCMA levels were assessed by flow cytometry and qPCR pre-treatment, 2-4 weeks after first pembro dose, then q4 weeks until progression. Pembro dosing was 200 mg every 3 weeks; dex dosing was 20-40 mg/week.

[1263] Results:

[1264] Characteristics of five subjects are shown in Table 39. Median prior lines were 9; all had high-risk cytogenetics. All were refractory to pom, 2 to pembro/pom/dex, and 1 to do. Best response to CART-BCMA was PR in 2, MR in 2, and PD in 1. Median time from CART-BCMA to pembro-based therapy was 117 days. All patients still had CART-BCMA cells detectable by qPCR, with 2 (pts. 07 and 21) still detectable by flow, at initiation of salvage therapy. The first pt. (02) received pembro/pom/dex and had MR but progressed at 2 months, with no detectable CART-BCMA re-expansion. The second pt. (07) had rapidly-progressing kappa light chain MM 2 months post-CART-BCMA and had previously progressed on pembro/pom/dex. He started elo/pembro/pom/dex and had MR at day 12 (free kappa 1446 to 937 mg/L), associated with robust expansion of CART-BCMA cells (875.64 to 20505.07 copies/μg DNA by qPCR; 0.7% to 6.4% of peripheral CD3+ cells by flow). Re-expanded CART-BCMA cells were predominantly CD8+ and highly activated (89% HLA-DR+, up from 18% pre-therapy). This response was short-lived, however, with progression 1 week later, and return of CART-BCMA levels to baseline at week 5. Three subsequent subjects then received elo/pembro/dex with either len or pom; with 2 MR and 1 SD, and PFS of 3 to 4 months. None had re-expansion of CART-BCMA cells. Non-specific immune modulation was observed and included altered CD4:CD8 T cell ratio (n=5), increased NK cell/decreased T cell frequency (n=4), and HLA-DR upregulation on CAR-negative T cells (n=2). More detailed phenotyping of CART and other immune cells, including PD-1 expression, is ongoing. With regard to toxicity, pt. 02 had self-limiting low-grade fevers and myalgias 4 weeks after pembro/pom/dex, associated with mild elevation in ferritin/CRP, suggestive of mild CRS. No other CRS was noted, including pt. 07 despite CART-BCMA re-expansion. One patient (17) developed recurrent expressive aphasia starting 2 months after elo/pembro/pom/dex, without signs of CRS and no observed expansion of CART-BCMA cells in blood or CSF. This resolved with stopping therapy and brief steroid taper.

[1265] Conclusions:

[1266] This study demonstrates that a PD1-inhibitor combination can induce CART cell re-expansion and anti-MM response in a MM patient progressing after CART-BCMA therapy. Since this patient previously progressed on pembro/pom/dex, the observed clinical activity was likely related to the CART cells, with elotuzumab also possibly contributing. This proof-of-principle observation suggests that a subset of patients may respond to checkpoint blockade or other immune-modulating approaches following BCMA CART cell therapy, meriting further study.

TABLE 39
Patient characteristics

| | | | Best | CART D 0 to | | Best | PFS post- | CART | Peak CART |
|---|---|---|---|---|---|---|---|---|---|
| | | | CART | Pembro D 0 | | Pembro | Pembro | qPCR | qPCR |
| Pt | Age/Sex | Cohort | Response | (Days) | Pembro Regimen | Response | (Days) | pre-Pembro\hat{ } | post-Pembro\hat{ } |
| 2 | 68/M | 1 | MR | 117 | Pembro/Pom/Dex | MR | 67 | 331.59 | 128.82 |
| 7 | 44/M | 1 | PR | 51 | Elo/Pembro/Pom/Dex | MR | 18 | 875.64 | 20505.07 |
| 13 | 59/M | 2 | MR | 149 | Elo/Pembro/Len/Dex | MR | 105 | 50.34 | 50.72 |
| 17 | 64/F | 3 | PR | 134 | Elo/Pembro/Pom/Dex | MR | 130 | 405.56 | 320.61 |
| 21 | 73/M | 3 | PD | 34 | Elo/Pembro/Len/Dex | SD | 83 | 8372.96 | 433.28 |

Cohort 1==5 × 10⁸ CART-BCMA cells alone;
Cohort 2 = 1.5 g/m² Cy and 5 × 10⁷ cells;
Cohort 3 = 1.5 g/m² Cy and 5 × 10⁸ cells Pembro = Pembrolizumab;
Elo = Elotuzumab; Pom = Pomalidomide;
Len = Lenalidomide; Dex = Dexamethasone;
Cy = cyclophosphamide SD = stable disease;
MR = minimal response;
PR = partial response;
PD = progressive disease;
PFS = progression-free survival;
units are copies/μg genomic DNA

### Example 10: Clinical and Biologic Activity of B-Cell Maturation Antigen-Specific Chimeric Antigen Receptor T Cells (CART-BCMA) in Refractory Multiple Myeloma: A Single-Centre, Open-Label, Phase 1 Trial

### Abstract

[1267] Background:

[1268] Chimeric antigen receptor (CAR) T cells are a promising new therapy for hematologic malignancies. B-cell maturation antigen (BCMA) is a cell-surface receptor with expression largely restricted to plasma cells, making it a rational target for multiple myeloma (MM) therapy. Methods: A phase I study of autologous T cells lentivirally-transduced with a novel, fully human, BCMA-specific CAR containing CD3t and 4-1BB signaling domains (CART-BCMA), were conducted in subjects with relapsed/refractory MM. Twenty-five subjects were treated in 3 dose cohorts: 1) 1-5×10⁸ CART-BCMA cells alone; 2) Cyclophosphamide (Cy) 1.5 g/m²+1-5×10⁷ CART-BCMA cells; and 3) Cy 1.5 g/m²+1-5×10⁸ CART-BCMA cells. No pre-specified BCMA expression level was required. Findings: Subjects had a median of 7 prior therapy lines; 96% were dual-refractory to a proteasome inhibitor and immunomodulatory drug; 96% had high-risk cytogenetics. CAR T cells were successfully manufactured in all cases. Toxicities included cytokine release syndrome and neurotoxicity, which were grade ¾ in 8 (32%) and 3 (12%) subjects, respectively, and reversible. CART-BCMA cells expanded in all subjects, most consistently in cohort 3. Clinical responses were seen in 4/9 (44%) in cohort 1, ⅕ (20%) in cohort 2, and 7/11 (63%) in cohort 3, including 5 partial, 5 very good partial, and 2 complete responses. Three subjects had ongoing responses at 11, 14, and 32 months. Decreased BCMA expression on residual MM cells was noted in responders; expression increased at progression in most. Responses were associated with CART-BCMA expansion, which was associated with CD4:CD8 T cell ratio and frequency of CD45RO−CD27+CD8+ T cells in the pre-manufacturing leukapheresis product. Interpretation: CART-BCMA infusions given with or without lymphodepleting chemotherapy are clinically active in heavily-pretreated MM patients and represent a novel approach to MM therapy.

[1269] This study provides further clinical validation of BCMA as a rational target for myeloma therapy, and characterises the safety and efficacy of a novel, fully human BCMA-specific CAR construct containing a 4-1BB co-stimulatory domain. This study further describes biologic and clinical activity of BCMA-specific CAR T cells both with and without lymphodepleting chemotherapy; demonstrates dynamic BCMA expression on myeloma cells post-infusion, particularly in responding patients; and identifies potential novel biomarkers of CAR T cell expansion and clinical response.

### Methods

### Study Design and Participants

[1270] Eligible subjects had relapsed and/or refractory MM after at least 3 prior regimens, or 2 prior regimens if dual-refractory to a proteasome inhibitor (PI) and immunomodulatory drug (IMiD). Other key eligibility criteria at screening included ECOG (Eastern Cooperative Oncology Group) performance status of 0-2; serum creatinine ≤2.5 mg/dL or estimated creatinine clearance ≥30 ml/min; absolute neutrophil count ≥1000/μl and platelet count ≥50,000/μl (≥30,000/μl if bone marrow plasma cells were ≥50% of cellularity); SGOT ≤3 times upper limit of normal and total bilirubin ≤2.0 mg/dl; left ventricular ejection fraction ≥45%; lack of active auto-immune disease; and lack of central nervous system involvement with myeloma. No pre-specified level of BCMA expression on MM cells was required.

[1271] This clinical trial (NCT02546167) was a phase 1, single-centre, open-label study. Initially a standard 3+3 dose-escalation design was used, exploring 3 sequential cohorts: 1) 1-5×10⁸ CART-BCMA cells alone; 2) Cyclophosphamide (Cy) 1.5 g/m²+1-5×10⁷ CART-BCMA cells; and 3) Cy 1.5 g/m²+1-5×10⁸ CART-BCMA cells. The protocol was amended to expand each cohort to 9 treated subjects, to gain more information about the safety and efficacy of CART-BCMA cells both with and without lymphodepleting conditioning and at a higher (1-5×10⁸) and lower (1-5×10⁷) dose. A subsequent amendment stopped enrollment in cohort 2 after 5 subjects due to suboptimal efficacy, and allowed up to 13 subjects in cohort 3; however, funding limitations ultimately ended enrollment after 11 treated Cohort 3 subjects (total n=25 treated).

### Procedures

[1272] After a 2-week washout from therapy (4 weeks for monoclonal antibodies), subjects underwent steady-state leukapheresis to collect T cells for CART-BCMA manufacturing. Anti-myeloma therapy could resume during manufacturing until 2 weeks prior to first CART-BCMA infusion. CART-BCMA cells were administered intravenously over 3 days (10% of dose on day 0; 30% on day 1, and 60% on day 2), as described in Porter D L, et al., Sci Transl Med 2015; 7(303): 303ra139. The 30% or 60% dose could be held if subjects developed signs of CRS. Cy was administered 3 days prior to first CART-BCMA infusion. Clinical and laboratory assessments were performed as per FIG. 46.

[1273] CART-BCMA cells were manufactured in the FACT-accredited Clinical Cell and Vaccine Production Facility at the University of Pennsylvania, as described in Porter D L, et al., Sci Transl Med 2015; 7(303): 303ra139; Kalos M, et al., Sci Transl Med 2011; 3(95): 95ra73. The frequency of CD3, CD4, and CD8 cells was determined by flow cytometry in the seed culture at beginning and end of manufacturing. Fold expansion and population doubling of seeded cells was measured by cell counting on a Coulter Multisizer™. After manufacturing and quality control testing, CART-BCMA cells were cryopreserved until time of infusion.

[1274] Data on adverse events (AEs) were collected from time of first CART-BCMA infusion (or Cy administration for cohorts 2 and 3). Toxicity grade was determined according to National Cancer Institute's Common Terminology Criteria for Adverse Events version 4.0, with the exception of cytokine release syndrome, which was graded as per the University of Pennsylvania CRS Grading System (Table 38) (Porter D L, et al., Sci Transl Med 2015; 7(303): 303ra139). Myeloma responses were assessed by updated International Myeloma Working Group criteria (Kumar S, et al., Lancet Oncol 2016; 17(8): e328-46).

[1275] Research sample processing, freezing, and laboratory analyses were performed in the Translational and Correlative Studies Laboratory at the University of Pennsylvania, as described (Maude S L, et al., N Engl J Med 2014; 371(16): 1507-17; Porter D L, et al., Sci Transl Med 2015; 7(303): 303ra139; Kalos M, et al., Sci Transl Med 2011; 3(95): 95ra73). CART-BCMA cells were quantified from peripheral blood or bone marrow samples by flow cytometry and quantitative PCR. Reagents and protocols for flow cytometry are described in the Supplementary Methods. Genomic DNA was isolated directly from whole blood or marrow aspirate, and qPCR analysis was performed using ABI TaqMan technology and a validated assay to detect the integrated CAR transgene sequence as per Supplementary Methods and described in Kalos M, et al., Sci Transl Med 2011; 3(95): 95ra73.

[1276] Serum cytokine levels were assessed on batched cryopreserved samples using the human cytokine magnetic 30-plex panel (LHC6003M) from Life Technologies, as described in Maude S L, et al., N Engl J Med 2014; 371(16): 1507-17. Measurement of soluble BCMA, BAFF, and APRIL concentrations in serum was performed by ELISA using antibody sets for human BCMA (DY193), APRIL (DY884B) and BAFF (DT124-05) from R&D Systems. See Supplementary Methods for details.

[1277] Flow cytometric assessment of MM cells, including BCMA expression, on fresh bone marrow aspirate material was adapted from the EuroFlow protocol as described in Flores-Montero J, et al., Leukemia 2017; 31(10): 2094-103 and in Supplementary Methods. Flow cytometric assessment of T cell phenotype in cryopreserved leukapheresis specimens was performed and analyzed as described in Fraietta J A, et al., Nat Med 2018; 24(5): 563-71.

### Outcomes

[1278] The primary objective was to evaluate the safety of CART-BCMA in patients with relapsed/refractory myeloma. The primary endpoint was incidence of study-related grade 3 or higher AEs, including dose-limiting toxicities (DLTs). A DLT was defined as a serious AND unexpected AE whose relationship to study therapy could not be ruled out, occurring within 4 weeks of receiving protocol therapy. Hematologic toxicity was not considered a DLT due to the refractory nature of the underlying disease and expected myelosuppression from cyclophosphamide. In addition, any death related to protocol treatment, as well as any expected grade 4 organ toxicity or grade 4 neurologic toxicity that did not resolve or improve to grade 2 or less within 4 weeks of onset, despite medical management, was also considered a DLT. Secondary objectives were to assess feasibility of manufacturing CART-BCMA cells, and clinical activity. Secondary endpoints were frequency of successful manufacturing, and clinical outcomes, including response rates, progression-free survival, and overall survival. Exploratory endpoints included CART-BCMA expansion and persistence in vivo; changes in concentration of serum cytokines and soluble BCMA, and expression of BCMA on MM cells.

### Statistical Analysis

[1279] Statistical analysis of the study is primarily descriptive due to the pilot nature of the trial and small sample size of each cohort. Kaplan-Meier method was used to estimate duration of response, progression-free and overall survival and the associated median survival times. Association between a binary endpoint (e.g. response) and a continuous factor (e.g. CAR T cell numbers) was evaluated using the Mann-Whitney test. Association between a binary endpoint and a categorical factor (e.g. presence or absence of deletion 17p) was evaluated using Fisher's Exact test. Spearman correlations were used to measure the correlations between two continuous variables. Significance of the Spearman correlation against the null hypothesis of no correlation was computed based on permutation. Because the statistical analyses performed here are exploratory and hypothesis-generating in nature, no adjustment of the p-values was made for multiple comparisons. Exact p-values are reported when applicable. Analysis was performed using Graphpad Prism version 6.0.

### Results

[1280] From November 2015-December 2017, 34 subjects consented and 29 were eligible and commenced manufacturing, with 25 receiving CART-BCMA infusions. Four were not treated due to rapid disease progression/clinical deterioration during manufacturing and bridging therapy (FIG. 52). Baseline characteristics and prior lines of therapy are summarized in Table 40, with individual details shown in Table 42. Subjects had a median of 7 prior lines of therapy, with 96% dual refractory to a proteasome inhibitor (PI) and immunomodulatory drug (IMID), 72% refractory to daratumumab, and 44% penta-refractory to 2 PIs, 2 IMIDs, and daratumumab. Ninety-six % had at least 1 high-risk cytogenetic abnormality; 68% had either deletion 17p or a TP53 mutation. Baseline tumor burden was high (median 65% myeloma cells on bone marrow biopsy), and 28% had extramedullary disease.

TABLE 40
Subject characteristics

| Characteristic (n = 25) | Median (range) or % | |
|---|---|---|
| Age | 58 | (44-75) |
| Gender | 68% male; 32% female | |
| Median time from diagnosis (years) | 4.6 | (1.8-14.5) |
| High-risk cytogenetics* | 96% | |
| Del 17p or TP53 mutation | 68% | |
| Prior lines of therapy | 7 | (3-13) |
| Len/Bort/Pom/Carf**/Dara (% exposed) | 100%/100%/92%/96%/76% | |
| Len/Bort/Pom/Carf/Dara (% refractory) | 76%/88%/88%/80%/72% | |
| % Dual-/% Quad-/% Penta-refractory | 96%/56%/44% | |
| Prior Autologous SCT | 92% | |
| Extramedullary disease | 28% | |
| % Bone marrow plasma cells | 65 | (0-95) |
| Absolute CD3+ T cell count (cells/μL) | 538 | (151-1529) |
| pre-leukapheresis*** | | |
| Day 0 LDH (units/L) | 175 | (75-385) |
| Day 0 serum creatinine (mg/dL) | 0.93 | (0.55-2.87) |
| Day 0 hemoglobin (g/dL) | 9.1 | (6.4-12.4) |
| Day 0 platelets (×10³/μL) | 128 | (13-316) |

*Includes complex karyotype, gain 1q, deletion 17p, t(14; 16), and/or t(4; 14).
**Includes 1 patient who received oprozomib.
***n = 23 (subjects 01 and 02 did not have pre-pheresis T cell counts done).
Normal range = 900-3245 cells/μL
Bort = bortezomib; Carf = carfilzomib; Dara = daratumumab; Del = deletion; Dual-refractory = refractory to both a proteasome inhibitor (PI) and immunomodulatory agent (IMiD); LDH = lactate dehyrdrogenase; Len = lenalidomide; Penta-refractory = refractory to 2 Pls, 2 IMiDs, and dara; Pom = pomalidomide; Quad-refractory = refractory to 2 Pls and 2 IMiDs; SCT = stem cell transplant.

[1281] All subjects successfully manufactured minimum target goal of CART-BCMA cells, though 1 subject required 2 leukaphereses and manufacturing attempts. Final products were comprised of a median of 97% CD3+ T cells, with median CD4/CD8 ratio of 1.7. Twenty-one subjects received all 3 planned CART-BCMA infusions, with 4 receiving 40% of planned dose (3^{rd} infusion held due to early CRS). Further details of manufacturing, product characteristics, and dosing for each subject are shown in Table 43.

[1282] Grade 3 or higher adverse events, regardless of attribution, were seen in 24/25 subjects (96%) and are summarized in Table 41, with individual adverse events for each subject listed in Table 44. Cytokine release syndrome (CRS) was observed in 22/25 subjects (88%), and was grade ¾ on Penn grading scale (Porter D L, et al., Sci Transl Med 2015; 7(303): 303ra139) (Table 38) in 8 (32%), all of whom were treated at the 1-5×10⁸ dose. Median time to CRS onset was 4 days (range 1-11), with a median duration of 6 days (range 1-18), and median duration of hospitalization of 7 days (range 0-40). CRS was associated with elevations in ferritin and C-reactive protein, as described previously (Maude S L, et al., N Engl J Med 2014; 371(16): 1507-17). Seven subjects (28%) received IL-6 blockade with either tocilizumab (n=6) or siltuximab (n=1).

TABLE 41
Grade 3 or higher adverse events, regardless of attribution

| | Grade 3 | Grade 4 | Grade 5 | All | |
|---|---|---|---|---|---|
| Event | n | n | n | n (%) | |
| Leukopenia | 3 | 8 | 0 | 11 | (44%) |
| Neutropenia | 2 | 9 | 0 | 11 | (44%) |
| Lymphopenia | 3 | 6 | 0 | 9 | (36%) |
| Cytokine release syndrome | 7 | 1 | 0 | 8 | (32%) |
| Thrombocytopenia | 3 | 4 | 0 | 7 | (28%) |
| Hypophosphatemia | 7 | 0 | 0 | 7 | (28%) |
| Febrile neutropenia | 6 | 0 | 0 | 6 | (24%) |
| Hyponatremia | 6 | 0 | 0 | 6 | (24%) |
| Anemia | 4 | 1 | 0 | 5 | (20%) |
| Hypocalcemia | 3 | 2 | 0 | 5 | (20%) |
| AST increased | 2 | 1 | 0 | 3 | (12%) |
| Hypokalemia | 2 | 1 | 0 | 3 | (12%) |
| Neurotoxicity* | 1 | 2 | 0 | 3 | (12%) |
| Hypertension | 3 | 0 | 0 | 3 | (12%) |
| Lung infection | 2 | 0 | 0 | 2 | (8%) |
| Hypoalbuminemia | 2 | 0 | 0 | 2 | (8%) |
| Supraventricular tachycardia | 1 | 0 | 0 | 1 | (4%) |
| Papilledema | 1 | 0 | 0 | 1 | (4%) |
| Abdominal pain | 1 | 0 | 0 | 1 | (4%) |
| Death NOS** | 0 | 0 | 1 | 1 | (4%) |
| Fatigue | 1 | 0 | 0 | 1 | (4%) |
| Infections - other (fungemia) | 0 | 1 | 0 | 1 | (4%) |
| Sepsis | 0 | 1 | 0 | 1 | (4%) |
| Urinary tract infection | 1 | 0 | 0 | 1 | (4%) |
| Alk phos increased | 1 | 0 | 0 | 1 | (4%) |
| Ejection fraction decreased | 1 | 0 | 0 | 1 | (4%) |
| Fibrinogen decreased | 1 | 0 | 0 | 1 | (4%) |
| Hyperglycemia | 0 | 1 | 0 | 1 | (4%) |
| Hypoglycemia | 1 | 0 | 0 | 1 | (4%) |
| Pleural effusion | 1 | 0 | 0 | 1 | (4%) |
| Pleural hemorrhage | 0 | 1 | 0 | 1 | (4%) |

Highest grade toxicity experienced by subject is reported in table.
n = number of subjects who had the event; Alk phos = alkaline phosphatase; AST = aspartate aminotransferase.
*Neurotoxicity includes 1 subject with grade 3 seizures, grade 4 delirium, and grade 4 reversible posterior leukoencephalopathy syndrome (RPLS) (also known as posterior reversible encephalopathy syndrome (PRES)); 1 subject with grade 3 delirium and grade 4 encephalopathy; and 1 subject with grade 3 encephalopathy.
**Death NOS (not otherwise specified) in subject 08 with candidemia and rapidly progressive myeloma; family chose to pursue comfort measures only.

[1283] Neurotoxicity was seen in 7/25 subjects (28%), and was mild (grade 1/2) in 4 (transient confusion and/or aphasia). Three (12%) had grade 3/4 encephalopathy including 1 subject (03) in cohort 1 with a DLT of PRES (posterior reversible encephalopathy syndrome) with severe obtundation, recurrent seizures and mild cerebral edema on MRI (magnetic resonance imaging) that fully resolved after treatment with high-dose methylprednisolone (1 g/day x 3) and cyclophosphamide 1.5 g/m². The others had no objective changes on MRI. All 3 subjects with severe neurotoxicity had high tumor burden (2 with extramedullary disease); had received a dose of 5×10⁸ CART-BCMA cells; and had grade 3 or 4 CRS. The only other DLT was grade 3 cardiomyopathy and grade 4 pleural hemorrhage/spontaneous hemothorax in subject 27 (cohort 3) in the setting of CRS, coagulopathy, thrombocytopenia, and extensive myelomatous rib lesions; all these toxicities fully resolved. One subject (08) who had grade 4 encephalopathy and CRS initially improved with tocilizumab and steroids, then developed candidemia and progressive myeloma/evolving plasma cell leukemia. Family opted for comfort care and he expired at day 24. No other deaths occurred on study. No unexpected off-target toxicities were observed.

[1284] Regarding clinical outcomes, objective responses (partial response (PR) or better) were confirmed in 4/9 subjects (44%) in cohort 1, 1/5 (20%) in cohort 2, and 7/11 (63%) in cohort 3 (FIGS. 47A-47C), including 5 PR, 5 very good partial responses (VGPR), 1 complete response (CR), and 1 stringent complete response (sCR). Thus overall response rate was 12/25 (48%), and was 11/20 (55%) at the more effective dose of 1-5×10⁸ CART-BCMA cells. Five additional subjects had minimal response (MR). Four of 7 subjects with extramedullary disease responded (FIG. 32B). Four subjects (01, 03, 15, 19) had no detectable myeloma (i.e. MRD-negative) by flow cytometry (estimated sensitivity 10⁻⁵) from post-infusion marrow aspirates at months 1 and/or 3. Median time to first response was 14 days. Based on Kaplan-Meier estimates, median duration of response (for PR or better) was 124.5 days (range 29-939+) (FIG. 53A). At time of data cut-off, 3 subjects (01, 19, 33) remained progression free at 953, 427, and 322 days (roughly 32, 14, and 11 months), respectively. All other subjects have progressed, and median progression-free survival (PFS) is 65, 57, and 125 days for cohorts 1, 2, and 3, respectively (FIG. 53C). At time of data cut-off, 13 subjects had expired, with median overall survival of 502 days for all subjects (FIG. 53B), and 359 days, 502 days, and not reached for cohorts 1, 2, and 3, respectively (FIG. 47D).

[1285] All infused subjects had detectable CART-BCMA cells in peripheral blood by qPCR (FIGS. 48A-48C), and 24/25 had detectable CAR⁺ T cells by flow cytometry (FIGS. 54A-54C; FIG. 38 for representative staining). Expansion generally peaked at day 10-14, and appeared most uniform in cohort 3 with Cy conditioning and the higher dose of CART-BCMA cells, while it was more heterogeneous in cohorts 1 and 2, though this difference did not meet statistical significance (FIG. 48D). Despite a predominance of CD4+ T cells in the infused product, CART-BCMA cells circulating in blood were predominantly CD8+, and were highly activated, with a median of 94% (range 21-94%) of CAR+CD3+ cells expressing HLA-DR during peak expansion (Table 45). CART-BCMA levels in marrow aspirates generally mirrored those in peripheral blood, and also were elevated in pleural fluid and cerebrospinal fluid for subject 03, and pleural fluid from subject 27, demonstrating widespread trafficking (Table 46). Following peak expansion, CART-BCMA cell levels by qPCR declined in a log-linear fashion in the majority of patients (FIGS. 48A-48C), and were still detectable at 3 months post-infusion in 20/20 (100%) subjects tested, and at 6 months in 14/17 (82%) tested. Subject 01 (in stringent CR) continued to have detectable cells by qPCR when last tested at 2.5 years post-infusion.

[1286] Thirty cytokines were quantified in peripheral blood serum before and after CART-BCMA infusion. Nineteen of these were increased >5-fold over baseline in more than 1 subject, with the most frequent increases observed for IL-6, IL-10, monokine induced by interferon-gamma (MIG, CXCL9), IP-10, IL-8, GM-CSF, and IL-1 receptor antagonist (IL-1RA) (FIG. 55). More severe CRS (Grade 3/4, or Grade 2 receiving tocilizumab) was associated with increases in multiple cytokines (Table 47), most significantly with IL-6, IFN-γ, IL-2 receptor alpha (IL2-Rα), macrophage inflammatory protein 1 alpha (MIP-1a), and IL-15 (FIGS. 49A-49E). Neurotoxicity was most strongly associated with increases in IL-6, IFN-γ, IL-1RA and MIP-1α, (FIGS. 49F-49I, see Table 48 for full analysis). Significant differences were not observed in peak fold cytokine increases between Cohorts 1 and 3, which received the same dose of CART-BCMA cells with or without Cy conditioning, respectively (FIG. 55).

[1287] Serum concentration of sBCMA, as well as its ligands BAFF and APRIL, were also assessed. Compared to a panel of healthy donors (HD), enrolled subjects had significantly elevated sBCMA and reduced APRIL levels at baseline, with high variability amongst subjects (FIG. 50A). BAFF concentrations in subjects were not significantly different from HD. Serial assessments of serum sBCMA showed decreases following CART-BCMA infusions, which were more pronounced in responding compared to non-responding subjects (FIG. 50B), and which increased as subjects developed progressive disease, suggesting that serum sBCMA concentration may be a useful adjunctive biomarker for assessing myeloma disease burden. Twenty subjects were evaluable for BCMA surface expression on MM cells by flow cytometry performed on fresh marrow aspirates prior to treatment, and all had detectable BCMA expression, though intensity varied (median mean fluorescence intensity (MFI)=3741, range 206-24842; see FIG. 42 for representative gating). Of 18 subjects with evaluable serial BCMA expression (FIG. 50C), either at 1 month (n=16), 3 months (n=8), and/or 5.5 months (n=1), 12 (67%) had a decline in BCMA intensity at least at 1 post-infusion time-point, including 8/9 responders and 4/9 non-responders (FIG. 50D). BCMA intensity was lowest on residual MM cells 1 month post-CART-BCMA, and increased back toward baseline in most, but not all, subjects with subsequent testing. Individual subject details are provided in Table 49.

[1288] Responses were significantly associated with peak expansion by qPCR (median 75339 copies/μg DNA for ≥PR vs. 6368 copies/μg for ≤PR, p=0.0002), as well as with persistence over the first 28 days, as measured by the area under the curve (AUC₀₋₂₈d) (median 561796 copies*days/μg DNA for ≥PR vs. 52391 copies*days/μg DNA for <PR, p=0.0002) (FIGS. 51A-51B). Both expansion and response were more likely in the setting of more severe CRS (grade 3/4 or grade 2 requiring tocilizumab) (FIGS. 51C-51D). Neither expansion nor response were significantly associated with age, years from diagnosis, number of prior lines of therapy, presence of dell7p or TP53 mutation, being penta-refractory, most recent therapy pre-pheresis, bone marrow MM cell percentage, baseline serum sBCMA concentration, or MM cell BCMA intensity (FIGS. 56A-56L and 57A-57L).

[1289] In order to explore other pre-treatment characteristics potentially associated with expansion and/or response, features of the CART-BCMA product before, during, and at end of manufacturing were analyzed. It was found that a higher CD4/CD8 T cell ratio in the leukapheresis product, pre-manufacturing, was associated with greater in vivo CART-BCMA expansion (FIG. 51E), and to a lesser degree, response (FIG. 51F), while absolute CD3+, CD4+, or CD8+ T cell numbers in the leukapheresis product, or CD4/CD8 ratio in the final CART-BCMA product at end of manufacturing was not (data not shown). Fold expansion of seeded cells during manufacturing also correlated with in vivo CART-BCMA expansion (FIG. 51G), suggesting that in vitro proliferative capacity may predict for in vivo activity. Finally, CD8+ T cells within the leukapheresis products in subjects treated with CART-BCMA cells were examined and it was found that subjects with higher frequencies of CD27+CD45RO− CD8+ T cells were more likely to have robust in vivo expansion and clinical response (FIGS. 51H-51I).

### DISCUSSION

[1290] CAR T cell therapy is emerging as a promising therapeutic option for B-cell malignancies, with the potential for durable disease control following a single treatment, differentiating it from other therapies that require repeated and/or continuous administration. In this report, the potential of CAR T cell therapy was demonstrated in advanced refractory myeloma, with 12/25 subjects (48%) achieving a partial response or better, including 7/11 (63%) treated at optimal doses (>10⁸ CART-BCMA cells) following lymphodepleting chemotherapy. Three subjects had ongoing remissions >11 months after CART-BCMA therapy, including one ongoing sCR at 2.5 years. This is notable given the highly adverse biological features of the enrolled subjects' myeloma, including high tumor burden, rapidly progressing disease, and high-risk genetics. This clinical activity further validates BCMA as a highly attractive target in myeloma. Importantly, this activity was seen despite the fact that this study, unlike the previous study, did not exclude patients with low BCMA expression or high tumor burden, and used either no lymphodepletion or Cy alone, compared with Cy+fludarabine in the prior study (Ali S A, et al., Blood 2016; 128(13): 1688-700; Brudno J N, et al., J Clin Oncol 2018; 36(22): 2267-80). CAR T cell products were successfully manufactured from all subjects, despite baseline T cell lymphocytopenia, and engraftment was seen in all as well, though peak levels and persistence of CAR T cells varied significantly amongst subjects.

[1291] In this study, responses correlated with degree of in vivo expansion, which in turn was associated with higher pre-manufacturing CD4/CD8 T cell ratio, pre-manufacturing frequency of CD45RO−CD27+CD8+ T cells, and magnitude of in vitro proliferation during manufacturing. This suggests that more effective CART-BCMA products may be derived from subjects with a less differentiated, more naïve and/or stem cell memory-like T cell compartment. These data suggest that pre-treatment phenotypic and/or functional T cell characteristics may aid in the prediction of response to CART-BCMA therapy. They also suggest that treatment of patients earlier in the course of their disease, when T cells may be intrinsically “fitter,” or modifying manufacturing techniques to generate more phenotypically favorable CAR+ T cells, may be more effective.

[1292] Successful adoptive transfer of tumor-specific T cells, including CAR T cells, in humans has most commonly followed some form of lymphodepleting conditioning (Turtle C J, et al., Sci Transl Med 2016; 8(355): 355ra116; Maude S L, et al., N Engl J Med 2014; 371(16): 1507-17; Porter D L, et al., Sci Transl Med 2015; 7(303): 303ra139; Dudley M E, et al., J Clin Oncol 2008; 26(32): 5233-9), which has been demonstrated to enhance T cell-mediated anti-tumor immunity via multiple potential mechanisms, including reduction of cellular “sinks” leading to increased availability of homeostatic cytokines, and depletion of suppressor cell populations such as regulatory T cells, among others (Gattinoni L, et al., Nat Rev Immunol 2006; 6(5): 383-93). This study demonstrates that lymphodepletion is not absolutely required for robust and sustained CAR T cell expansion and clinical activity, as seen with subjects 01 and 03 in Cohort 1. However, short-term expansion was observed more consistently in Cohort 3, where subjects received Cy conditioning, compared to Cohort 1 (FIGS. 48A and 48C), demonstrating an effect of lymphodepletion on CAR-T cell kinetics following adoptive transfer. It is possible that modifying the lymphodepletion (e.g. adding fludarabine to Cy) may further augment the activity of CART-BCMA cells.

[1293] An important unanswered question for BCMA-targeted CAR T cells is whether there is a threshold of BCMA expression on MM cells required for optimal recognition and killing. In the previously-reported NCI trial, 52/85 (62%) of pre-screened bone marrow biopsies stained for BCMA by IHC met their pre-specified threshold for eligibility, meaning more than a third of potentially eligible MM patients would have been excluded (Ali S A, et al., Blood 2016; 128(13): 1688-700). This study did not require any specific level of BCMA as an eligibility requirement, and identified MM cell BCMA expression by flow cytometry in all subjects, consistent with recent data that flow cytometry is more sensitive than IHC for this purpose (Salem D A, et al., Leuk Res 2018; 71: 106-11). Baseline BCMA intensity by flow cytometry did not correlate with either expansion or response in this study (FIGS. 56A-56L and 57A-57L), suggesting that excluding patients based on baseline BCMA expression is likely not necessary.

[1294] The observed dynamics of BCMA surface expression on MM cells, with the residual MM cells from several subjects in this study having significantly diminished BCMA intensity following CAR T cell therapy (FIGS. 50A-50D), highlights an important area for future research into resistance to CART-BCMA therapy. Down-modulation of BCMA expression was also observed in at least 1 subject in the NCI study (Brudno J N, et al., J Clin Oncol 2018; 36(22): 2267-80), suggesting that it may be a common means of MM cell escape from BCMA-directed CAR-T cell therapies. Surface BCMA expression subsequently increased in most subjects upon progression, suggesting a transcriptional or post-translational mechanism, such as increased shedding from the cell surface. Alternatively, there may be immune selection for BCMA-dim/negative clonal variants, which are subsequently outcompeted by residual BCMA+clones upon loss of CART-BCMA cells. This suggests that most patients progressing after CART-BCMA will remain candidates for additional BCMA-targeted therapies.

[1295] The primary toxicities of CAR T cells remain cytokine release syndrome (CRS) and neurotoxicity. The frequency and severity of CRS in this study was similar to that reported in CD19-targeted CAR T cell trials (Maude S L, et al., N Engl J Med 2014; 371(16): 1507-17; Porter D L, et al., Sci Transl Med 2015; 7(303): 303ra139), and was abrogated with IL-6 receptor blockade therapy. Though patient numbers are small, peak serum cytokine increases did not appear to differ significantly with or without Cy lymphodepletion, when CAR T cell dose was kept the same (Cohort 1 vs. 3, FIG. 55). Interestingly, however, median peak fold-increases of IL-6 and several other cytokines (e.g. IFN-γ, IL-10, GMCSF, IL-17) in this study were 1 to 2 orders of magnitude lower than that reported in the NCI BCMA CAR T cell study (Brudno J N, et al., J Clin Oncol 2018; 36(22): 2267-80), despite a higher tumor burden in this study. One explanation for this difference may be the co-stimulatory domains used within the 2 CAR constructs, since CD28 domains, such as that used in the NCI CAR construct, have been associated with more rapid CAR T cell proliferation and cytokine release than 4-1BB domains (Milone M C, et al., Mol Ther 2009; 17(8): 1453-64), as used in this CAR construct. However, the small numbers of patients and multiple differences between the studies with regards to inclusion criteria, dose, schedule, and lymphodepletion regimen preclude definitive conclusions.

[1296] Neurotoxicity has been reported in up to 50% of subjects in some CAR T cell trials (Turtle C J, et al., Sci Transl Med 2016; 8(355): 355ra1 16; Turtle C J, et al., J Clin Invest 2016; 126(6): 2123-38; Kochenderfer J N, et al., J Clin Oncol 2015; 33(6): 540-9); can occur concurrently with or subsequent to CRS; often does not improve with tocilizumab; and is reversible in most, but not all, cases. Neurotoxicity has been associated with early onset of CRS and rapid elevation of inflammatory cytokines both within the serum and CNS, perhaps leading to increased CNS vascular permeability (Gust J, et al., Cancer Discov 2017).

[1297] Consistent with this, this study identified peak serum increases of IL-6, IFN-γ, and MIP-1α as most associated with neurotoxicity in this study (FIGS. 49A-49I). Interestingly, neurotoxicity was also associated with peak fold increase in IL-1RA, an endogenous inhibitor of the pro-inflammatory effects of IL-1α and IL-1β, which have been implicated in CART cell-associated neurotoxicity (Giavridis T, et al., Nat Med 2018; 24(6): 731-8; Norelli M, et al., Nat Med 2018; 24(6): 739-48). This perhaps reflects induction of an (ultimately ineffective) feedback mechanism in patients with neurotoxicity, and suggests that augmenting IL-1 blockade via the recombinant IL-1RA anakinra may have therapeutic benefit in this setting, as demonstrated in pre-clinical models (Giavridis T, et al., Nat Med 2018; 24(6): 731-8; Norelli M, et al., Nat Med 2018; 24(6): 739-48). This study demonstrating rapid reversal of a PRES-like syndrome in subject 03 suggests that cyclophosphamide may also be an option in steroid-refractory cases.

[1298] In summary, autologous T cells expressing a fully human BCMA-specific CAR could expand and induce objective responses, both with and without lymphodepleting chemotherapy, in subjects with advanced, refractory MM, and represent a promising new therapeutic approach. The toxicity profile appears similar to that seen with CD19-directed CAR T cells in B-cell malignancies. Challenges include disease progression during manufacturing, potential for antigen escape due to changes in BCMA expression, and durability of responses. Subsequent studies exploring less heavily-pretreated/refractory patient populations, dual-antigen-targeting CAR constructs, novel lymphodepletion regimens or manufacturing protocols, and off-the-shelf CART products may further optimize the safety and long-term efficacy of this approach.

### Supplementary Methods

[1299] Reagents and Protocols for Flow Cytometry:

[1300] Antibodies for CAR T cell detection panels were anti-CD45 V450 (clone HI30), anti-CD14 V500 (clone M5E2), anti-CD56 Ax488 (clone B159), anti-CD4 PerCP-Cy5.5 (clone RPA-T4), anti-CD8 APC-H7 (clone SK1) (all from BD Bioscience). Also, anti-CD3 BV605 (clone OKT3), anti-HLA-DR BV711 (clone L243), anti-CD19 PE-Cy7 (clone H1B19) were used from Biolegend. CART-BCMA expression was assessed by using a bis-biotinylated BCMA-Fc recombinant protein and the secondary staining reagent Streptavidin-PE from BD Bioscience (cat #554061). Cells were resuspended in 100 μL PBS containing 1% fetal bovine serum, 0.02% sodium azide and bis-biotinylated BCMA-Fc and incubated for 30 min on ice, washed, resuspended in 100 μL PBS containing 1% fetal bovine serum, 0.02% sodium azide, surface antibodies and SA-PE, and incubated for 30 minutes on ice, washed, resuspended in 250 ul PBS containing 1% fetal bovine serum and 0.02% sodium azide and acquired using a Fortessa flow cytometer equipped with a violet (405 nm), blue (488 nm), a green (532 nm), and a red (628 nm) laser. Data were analyzed using FlowJo software (Version 10, Treestar). Compensation values were established using eBioscience UltraComp eBeads (eBioscience cat #01-222-42) and DIVA software.

[1301] Quantitative PCR:

[1302] Genomic DNA was isolated directly from whole blood or marrow aspirate, and qPCR analysis was performed using ABI TaqMan technology and a validated assay to detect the integrated CAR transgene sequence as described in Kalos M, et al., Sci Transl Med 2011; 3(95): 95ra73 using triplicates of 200 ng of genomic DNA per time point for peripheral blood and marrow samples. To determine copy number per unit DNA, an eight-point standard curve was generated consisting of 5 to 106 copies of lentivirus plasmid spiked into 100 ng of non-transduced control genomic DNA. The number of copies of plasmid present in the standard curve was verified using digital qPCR with the same primer/probe set and performed on a QuantStudio 3D digital PCR instrument (Life Technologies). Each datapoint (sample and standard curve) was evaluated in triplicate with a positive Ct value in three of three replicates with percent coefficient of variation of less than 0.95% for all quantifiable values. To control for the quality of interrogated DNA, a parallel amplification reaction was performed using 20 ng of genomic DNA and a primer/probe combination specific for a non-transcribed genomic sequence upstream of the CDKN1A (p21) gene as described in Kalos M, et al., Sci Transl Med 2011; 3(95): 95ra73. These amplification reactions generated a correction factor to adjust for calculated versus actual DNA input. Copies of transgene per microgram of DNA were calculated according to the formula: copies per microgram of genomic DNA=(copies calculated from CART-BCMA standard curve)×correction factor/(amount DNA evaluated in nanograms)×1000 ng.

[1303] Measurement of Serum Cytokines:

[1304] Human cytokine magnetic 30-plex panel (LHC6003M) was from Life Technologies. Serum samples collected at baseline and at scheduled time-points out until 28 days post-infusion were cryopreserved at −80° C. Batched samples were thawed and analyzed according to the manufacturers' protocols. Assay plates were measured using a FlexMAP 3D instrument, and data acquisition and analysis were done using xPONENT software. Data quality was examined based on the following criteria. The standard curve for each analyte has a 5P R² value >0.95 with or without minor fitting using xPONENT software. To pass quality control, the results for an in-house control serum needed to be within the 95% of CI (confidence interval) derived from historical in-house control data for >25 of the tested analytes. No further tests were done on samples with results out of range low (<OOR). Samples with results that were out of range high (>OOR) or greater than two times the standard curve maximum value (SC max) were re-tested at higher dilutions. Results that passed the above quality controls or retests were reported.

[1305] Measurement of soluble BCMA, BAFF, and APRIL:

[1306] Antibody sets for human BCMA (DY193), APRIL (DY884B) and BAFF (DT124-05) were from R&D Systems. ELISA bead-strip and 4-column reservoir (SOW-A16735) were from Assay Depot. ELISA substrate ADHP (Ser. No. 10/010,469) was from Cayman Chemical. Assay plates (OX1263) were from E&K Scientific. All ELISA reagents were prepared according to the protocols for DuoSet ELISA except for Color Reagent B, which was supplemented with ADHP at 100 uM. Due to limited volumes of sera and lack of availability of a Luminex assay for BCMA, APRIL and BAFF, the three analytes were measured using ELISA bead-strips. Instead of coating the capture antibody (cAB) to the wells of an ELISA plate, it was coated on the surfaces of macrospheres, which enabled the measurement of all three analytes using 100 ul of serum. Assays were set up using bead-strips in assay plates based on an assay map following the protocol for antibody sets. At the end of the assay, one substrate plate per 12 bead-strips was prepared by adding 100 ul/well of substrate solution (1:1 of color reagent A and ADHP). Each bead-strip was placed in one column of the substrate plate according to the assay map. Color development was for 10 to 30 minutes. Plates were read on a FLUO STAR OMEGA instrument. Data quality control was performed as described for Luminex data.

[1307] Assessment of Bone Marrow Myeloma Cells, Including BCMA Expression:

[1308] Flow cytometry assessment of bone marrow aspirate material was performed directly on aspirate following a brief ammonium chloride red blood cell lysis step. The procedure was adapted from the EuroFlow protocol as described in Flores-Montero J, et al., Leukemia 2017; 31(10): 2094-103. Briefly, up to 2m1s of bone marrow aspirate was diluted with 48 mls of Pharm Lyse solution (BD Biosciences Cat #555899) and incubated for 15 minutes at room temperature on a shaking device. The cells were then collected by centrifugation for 10 minutes at 800 g, washed twice with flow cytometry buffer (PBS with 1% fetal bovine serum), stained with L/D Aqua viability dye (Thermo Fisher Cat #L34957). Surface staining was done with a mixture of antibodies to CD45, CD19, CD138, CD38, CD14, CD56, CD20, CD3, CD269 (BCMA), CD274 (PD-L1). FMO (fluorescence minus one) secondary only controls were used for BCMA evaluation. Aliquots of normal donor PBMC cells were stained in parallel as controls. The cells were then washed before permeabilization/fixation using Cytofix/Cytoperm reagent (BD Biosciences) for 20 minutes at room temperature, washed, and stained with a mixture of antibodies to kappa and lambda immunoglobulin light chains. The samples were then washed before resuspension in PBS and acquisition on a 17-color LSR Fortessa Special Order Research Product flow cytometer (BD) equipped with a violet, blue, green, and red laser. List mode files were analyzed using either FlowJo (Treestar) or FCS Express.

TABLE 42
Individual subject characteristics

| | | | | | | | | | | |
|---|---|---|---|---|---|---|---|---|---|---|
| | | | | | | | | | # | Last tx before |
| | | | | Yrs | | | | | lines | pheresis, |
| Sub. | Age | Sex | Race | from Dx | Isotype | Karyotype | FISH | Mutation | * | infusion** |

Cohort 1

| | | | | | | | | | | |
|---|---|---|---|---|---|---|---|---|---|---|
| 01 | 66 | M | white | 9.6 | IgGK | 46XY | +11, | NRAS, | 11 | Pom/Dex |
| | | | | | | | −16q, | TP53, | | Pom/Dex |
| | | | | | | | −17p | TP53 | | |
| 02 | 68 | M | white | 6.3 | IgAK | 46XY | +1q, | n/a | 9 | Carfilz/Len/Dex |
| | | | | | | | +4p, | | | Carfilz/Cyclo/Dex |
| | | | | | | | −17p | | | |
| 03 | 54 | F | white | 3.1 | IgAL | n/a | +1q, | n/a | 4 | D-PACE |
| | | | | | | | t(4; 14), | | | D-AC |
| | | | | | | | −16q | | | |
| 07 | 44 | M | white | 1.8 | K | n/a | +1q, −4, | NRAS, | 9 | Carfilz/Pano |
| | | | | | | | +11, | TP53 | | Pom/Dex-ACE |
| | | | | | | | −14, −16 | | | |
| 08 | 70 | M | white | 3.3 | IgAL | complex | +1q, | n/a | 6 | Carfilz/Pom/Dex |
| | | | | | | | −1p, −4, | | | Carfilz/Pom/Dex |
| | | | | | | | −17p | | | |
| 09 | 61 | M | white | 6.6 | K | 46XY | t(11; 14), | none | 9 | Daratumumab |
| | | | | | | | −16q, | | | Pulse Dex |
| | | | | | | | −17p | | | |
| 10 | 47 | M | white | 4.9 | IgGL | n/a | +1q, | KRAS, | 7 | Pom/Dex |
| | | | | | | | t(11; 14) | SF3B1 | | Pom/Cyclo/Dex + |
| | | | | | | | | | | plasma exchange |
| 11 | 57 | F | AA | 6.3 | IgGL | 46XX | +1q, | n/a | 10 | VDT-PACE |
| | | | | | | | t(4; 14), | | | VDT-PACE |
| | | | | | | | −17p | | | |
| 15 | 51 | F | Asian | 4.7 | IgAK | 46XX | +1q, | NRAS, | 7 | Pembro/Pom/Dex |
| | | | | | | | t(11; 14) | KRAS, | | Pom/Dex |
| | | | | | | | | BIRC3, | | |
| | | | | | | | | KIT | | |

Cohort 2

| | | | | | | | | | | |
|---|---|---|---|---|---|---|---|---|---|---|
| 12 | 51 | F | white | 2.8 | IgAL | 46XX | +1q, | TET2 | 5 | CyBorD |
| | | | | | | | −1p, | | | CyBorD |
| | | | | | | | t(4; 14), | | | |
| | | | | | | | +17p | | | |
| 13 | 59 | M | white | 9.4 | IgGL | 46XY | +11, | n/a | 10 | Salvage ASCT |
| | | | | | | | −16q, | | | VD-CE |
| | | | | | | | −17p | | | |
| 14 | 54 | F | white | 4.9 | IgGK | 46XX | t(11; 14), | n/a | 7 | Venetoclax |
| | | | | | | | −16q, | | | none |
| | | | | | | | −17p | | | |
| 16 | 54 | M | white | 4.1 | IgGK | complex | +1q, | BRAF | 7 | D-CE |
| | | | | | | | −16q, | | | D-CE + radiation |
| | | | | | | | −17p | | | |
| 22 | 45 | M | white | 2.7 | IgGL | 46XY | t(11; 14), | n/a | 7 | D-ACE |
| | | | | | | | +1q, | | | none |
| | | | | | | | −17p | | | |

Cohort 3

| | | | | | | | | | | |
|---|---|---|---|---|---|---|---|---|---|---|
| 17 | 64 | F | white | 5.0 | IgAK | 46XX | t(14; 16), | n/a | 7 | CPI-610 |
| | | | | | | | +1q, | | | D-AC |
| | | | | | | | −1p, | | | |
| | | | | | | | +11 | | | |
| 19 | 58 | M | white | 4.1 | L | 46XY | r(11; 14), | n/a | 5 | Dara/Ixa/Pom/Dex |
| | | | | | | | +1q, | | | Dara/Ixa/Pom/Dex |
| | | | | | | | +17, | | | |
| | | | | | | | −17p | | | |
| 20 | 61 | M | white | 2.6 | IgGL | n/a | t(4; 14), | n/a | 6 | Carfilz/cyclo/pom/ |
| | | | | | | | +1q, | | | dex |
| | | | | | | | −17p | | | VD-AC |
| 21 | 73 | M | white | 2.5 | IgAK | 46XY | +1q, | TET2 | 5 | Dara/Pom/Dex |
| | | | | | | | +14, | | | Bort/Pom/Dex |
| | | | | | | | +17, | | | |
| | | | | | | | −17p | | | |
| 23 | 63 | M | white | 2.3 | IgGK | 46XY | none | none | 6 | Carfilz/Pom/Dex/ |
| | | | | | | | | | | Nelfin |
| | | | | | | | | | | VD-PCE |
| 25 | 51 | M | AA | 4.5 | IgGK | 46XY | t(11; 14), | FLT3 | 7 | Selinexor/Dex |
| | | | | | | | +1q | | | Bort/Venetoclax/ |
| | | | | | | | | | | Dex + XRT |
| 27 | 58 | F | AA | 10.3 | IgGK | complex | t(11; 14), | BRAF, | 13 | Carfilz/Venetoclax/ |
| | | | | | | | +1q, | TET2 | | Dex |
| | | | | | | | −1p, −16, | | | Carfilz/Venetoclax/ |
| | | | | | | | −17p | | | Dex |
| 29 | 60 | F | white | 1.8 | IgGK | 45X,-X | none | TET2, | 3 | VDT-PACE |
| | | | | | | | | RBI, | | none |
| | | | | | | | | TP53 | | |
| 32 | 65 | F | white | 14.5 | IgGL | 46XX | t(4; 14), | TET2, | 6 | Carfilz/Cyclo/Dex |
| | | | | | | | +1q, | TET2 | | Carfilz/Cyclo/Dex |
| | | | | | | | −17 | | | |
| 33 | 75 | M | white | 8.8 | IgGK | hyperdip | +5, +9, | RAD21 | 5 | Pembro/Len/Dex |
| | | | | | | | +11, | | | none |
| | | | | | | | +15, | | | |
| | | | | | | | −17p | | | |
| 34 | 47 | M | white | 2.0 | IgGL | 46XY | +1q, | MYCN, | 4 | Carfilz/Pom/Dex |
| | | | | | | | −1p, | TPMT | | VD-PACE |
| | | | | | | | +14q | | | |

*A line of therapy was defined as per IMWG criteria. Radiation was not counted as a line.
**Most recent therapy received before T cell collection (“pheresis” - top line) and CART-BCMA infusion (“infusion” - bottom line). All therapy was held for at least 2 weeks prior to pheresis and again for at least 2 weeks prior to infusion (4 weeks for monoclonal antibodies). AA = African-American; ASCT = autologous stem cell transplant; Bort = bortezomib; Carfilz = carfilzomib; cyclo = cyclophosphamide; CPI-610 = investigational BET inhibitor; CyBorD = cyclophosphamide, bortezomib, dexamethasone; D-AC = dexamethasone + infusional doxorubicin and cyclophosphamide; D-ACE = dexamethasone + infusional doxorubicin, cyclophosphamide, and etoposide; D-CE: dexamethasone + infusional cyclophosphamide and etoposide; D-PACE = dexamethasone + infusional cisplatinum, doxorubicin, cyclophosphamide, and etoposide; Dara = daratumumab; Dex = dexamethasone; Dx = diagnosis; hyperdip = hyperdiploid; ixa = ixazomib; K = kappa light chain; L = lambda light chain; Len = lenalidomide; Nelfin = nelfinavir; Pano = panobinostat; Pembro = pembrolizumab; Pom = pomalidomide; Pom/Dex-ACE = pomalidomide, dexamethasone + infusional doxorubicin, cyclophosphamide, and etoposide; Tx = treatment; VD-AC = bortezomib, dexamethasone + infusional doxorubicin and cyclophosphamide; VD-CE = bortezomib, dexamethasone + infusional cyclophosphamide and etoposide; VD-PCE = bortezomib, dexamethasone + infusional cisplatinum, cyclophosphamide, etoposide; VDT- PACE = bortezomib, dexamethasone, thalidomide + infusional cisplatinum, doxorubicin, cyclophosphamide, and etoposide; Yrs = years.

TABLE 43
CART-BCMA manufacturing and product details

| | | | | | | | | | |
|---|---|---|---|---|---|---|---|---|---|
| | | CD4: | | | | | | | |
| | % CD3+ | CD8 in | | CD4: | | | Trans | Total | |
| | in seed | seed | % CD3+ | CD8 at | Fold | Pop | Eff | #CAR+ | Best |
| Sub. | culture | culture | at harvest | harvest | exp | dblgs | (%) | given (×10⁸) | response |

Cohort 1

| | | | | | | | | | |
|---|---|---|---|---|---|---|---|---|---|
| 01 | 52.6 | 2.04 | 98.4 | 2.40 | 43.5 | 4.54 | 9.6 | 2.0* | sCR |
| 02 | 63 | 0.40 | 69.1 | 1.31 | 12.7 | 3.67 | 18.2 | 5.0 | MR |
| 03 | 58.4 | 2.47 | 97.6 | 1.72 | 17.9 | 4.16 | 25.9 | 2.0* | VGPR |
| 07 | 20.3 | 1.47 | 94.9 | 1.60 | 38.9 | 5.28 | 24.2 | 5.0 | PR |
| 08 | 20.8 | 0.31 | 92.5 | 2.99 | 7.9 | 2.98 | 22.7 | 3.5 | PD |
| 09 | 86.8 | 0.49 | 87.5 | 1.69 | 10.0 | 3.33 | 22.2 | 5.0 | SD |
| 10 | 47.3 | 1.07 | 96.7 | 1.32 | 11.5 | 3.52 | 16.5 | 1.77 | PD |
| 11 | 21.4 | 0.81 | 96.9 | 1.20 | 8.7 | 3.11 | 19.4 | 5.0 | MR |
| 15 | 90.8 | 0.71 | 96 | 1.24 | 22.6 | 4.50 | 33.3 | 2.0* | VGPR |

Cohort 2

| | | | | | | | | | |
|---|---|---|---|---|---|---|---|---|---|
| 12 | 80 | 0.38 | 96.2 | 3.23 | 31.7 | 4.98 | 21.7 | 0.5 | SD |
| 13 | 72 | 0.50 | 86.9 | 1.72 | 14.0 | 3.84 | 24.2 | 0.5 | MR |
| 14 | 94.6 | 0.81 | 98.9 | 2.21 | 60.4 | 5.92 | 31.8 | 0.5 | SD |
| 16 | 50.9 | 1.06 | 98.1 | 0.84 | 30.6 | 4.94 | 21.9 | 0.5 | PR |
| 22 | 65.1 | 0.46 | 98.4 | 1.39 | 49.3 | 5.62 | 11 | 0.5 | SD |

Cohort 3

| | | | | | | | | | |
|---|---|---|---|---|---|---|---|---|---|
| 17 | 84.4 | 0.59 | 97.3 | 1.87 | 56.8 | 5.83 | 27.4 | 5.0 | PR |
| 19 | 88.1 | 0.91 | 94.9 | 2.09 | 16.8 | 4.07 | 13.7 | 5.0 | CR |
| 20 | 70 | 0.70 | 97.4 | 2.17 | 32.3 | 5.02 | 8.4 | 5.0 | VGPR |
| 21 | 83.5 | 0.46 | 98.9 | 3.26 | 45.9 | 5.52 | 7.5 | 5.0 | SD |
| 23 | 74.7 | 0.42 | 97.6 | 1.46 | 45.1 | 5.77 | 11 | 5.0 | MR |
| 25 | 69.2 | 0.54 | 99 | 0.93 | 23.7 | 4.57 | 10.7 | 2.0* | PR |
| 27 | 69 | 0.91 | 97.9 | 0.90 | 25.1 | 4.65 | 15 | 5.0 | VGPR |
| 29 | 29.8 | 2.49 | 91.7 | 4.55 | 23.0 | 4.52 | 8.3 | 5.0 | SD |
| 32 | 71 | 1.23 | 98.3 | 1.87 | 40.0 | 5.32 | 8.9 | 5.0 | MR |
| 33 | 83.6 | 0.33 | 96.5 | 1.78 | 31.1 | 4.96 | 8.6 | 5.0 | PR |
| 34 | 62.7 | 1.73 | 96.4 | 4.02 | 29.3 | 4.87 | 14.7 | 5.0 | VGPR |

Frequency of total CD3+, CD3+CD4+, and CD3+CD8+ cells was assessed by flow cytometry at the start of manufacturing (“seed culture”, after elutriation), and at the end of manufacturing (“at harvest”). Aph = apheresis product; fold exp = fold expansion; pop dblgs = population doublings; trans eff = transduction efficiency. MR = minimal response; PD = progressive disease; PR = partial response; sCR = stringent complete response; SD = stable disease; VGPR = very good partial response
*Subjects 01, 03, 15, and 25 received only 40% of planned dose due to fevers/early CRS.

TABLE 44
Individual subject adverse events

| | | | | | |
|---|---|---|---|---|---|
| Sub. | Grade 1 | Grade 2 | Grade 3 | Grade 4 | Grade 5 |

Cohort 1

| | | | | | |
|---|---|---|---|---|---|
| 01 | Dry eye | DIC | Anemia | Lymphopenia | |
| | Dry mouth | Vertigo | Fatigue | | |
| | Vomiting | Ileus | CRS | | |
| | Flu-like symptoms | Nausea | Alk phos increased | | |
| | Metabolism disorder - | Fever | AST increased | | |
| | other (iron | Lung infection | Hypocalcemia | | |
| | deficiency) | Creatinine increased | Hypokalemia | | |
| | Myalgia | Thrombocytopenia | Hypophosphatemia | | |
| | Headache | Musculoskeletal | | | |
| | Ischemia | disorder - other | | | |
| | cerebrovascular | (generalized muscle | | | |
| | Nervous system | aches) | | | |
| | disorder - other | Urinary retention | | | |
| | (confusion) | Respiratory disorder - | | | |
| | Vascular disorder - | other (pulmonary | | | |
| | other (edema) | edema and atelectasis) | | | |
| | | Skin/SQ disorder - | | | |
| | | other (skin tear) | | | |
| | | Hypertension | | | |
| 02 | Sinus tachycardia | | Thrombocytopenia | | |
| | Gastrointestinal | | | | |
| | disorders - other | | | | |
| | (loose stool) | | | | |
| | Nausea | | | | |
| | Fatigue | | | | |
| | CRS | | | | |
| | Dizziness | | | | |
| | Headache | | | | |
| | Respiratory disorder - | | | | |
| | other (nasal and | | | | |
| | sinus congestion, | | | | |
| | cough) | | | | |
| 03 | Sinus bradycardia | SVT | CRS | Neutropenia | |
| | Ear disorder - other | Fatigue | UTI | Leukopenia | |
| | (ears feel full, hard to | Infection - other (S. | Fibrinogen | Hypocalcemia | |
| | hear) | mitis/S. oralis | decreased | RPLS | |
| | Eye disorder - other | bacteremia) | Hypophosphatemia | Delirium | |
| | (difficulty reading) | Upper respiratory | Seizure | | |
| | Constipation | infection | Pleural effusion | | |
| | Edema | Lymphopenia | Hypertension | | |
| | Fever | Hypernatremia | | | |
| | Hypokalemia | Musculoskeletal | | | |
| | Hypomagnesemia | disorder - other | | | |
| | Bone pain | (deconditioning, pain | | | |
| | Concentration | base of skull) | | | |
| | impairment | Intracranial | | | |
| | Headache | hemorrhage | | | |
| | Hoarseness | Respiratory disorder - | | | |
| | Skin/SQ disorder - | other (post-nasal drip) | | | |
| | other (ecchymosis) | Hypotension | | | |
| 07 | Infection - other | CRS | Anemia | | |
| | (upper respiratory | Dyspepsia | Hypokalemia | | |
| | infection) | Hypoalbuminemia | Hyponatremia | | |
| | Skin/SQ disorder - | Hypocalcemia | | | |
| | other (rash on face) | Respiratory, thoracic | | | |
| | | disorders - other | | | |
| | | (hemothorax) | | | |
| 08 | Sinus tachycardia | | Lung infection | CRS | Death |
| | General disorder - | | Delirium | Thrombocytopenia | NOS |
| | other (rigors) | | | Encephalopathy | |
| | | | | Infection - other | |
| | | | | (fungemia) | |
| 09 | Constipation | Anemia | Lung infection | | |
| | Chills | Pericardial effusion | | | |
| | Fatigue | CRS | | | |
| | Thrombocytopenia | Neutropenia | | | |
| | Anorexia | Hypocalcemia | | | |
| | Hypokalemia | Headache | | | |
| 10 | Chills | Thromobocytopenia | | | |
| | Fever | | | | |
| 11 | Nausea | CRS | Hypophosphatemia | | |
| | Fatigue | Infection - other | | | |
| | Thrombocytopenia | (Clostridium difficile) | | | |
| | Headache | Hypocalcemia | | | |
| | Respiratory disorder - | | | | |
| | other (cough, | | | | |
| | congestion) | | | | |
| 15 | Hypocalcemia | Fatigue | Thrombocytopenia | Neutropenia | |
| | Hypokalemia | CRS | Hypoglycemia | | |
| | Headache | Infection - other | | | |
| | Cough | (positive test for Shiga | | | |
| | Dyspnea | toxin) | | | |
| | Respiratory disorders - | Alk phos increased | | | |
| | other (nasal | Hypotension | | | |
| | congestion) | | | | |
| | Alopecia | | | | |

Cohort 2

| | | | | |
|---|---|---|---|---|
| 12 | Anemia | Infection - other | Febrile neutropenia | Sepsis |
| | Vomiting | (adenovirus) | | Neutropenia |
| | Fatigue | | | Leukopenia |
| | Fever | | | |
| | Hypocalcemia | | | |
| 13 | Diarrhea | Upper respiratory | Neutropenia | |
| | Fatigue | infection | | |
| | ALT increased | | | |
| | AST increased | | | |
| | Anorexia | | | |
| | Dizziness | | | |
| | Pruritis | | | |
| | Skin/subcutaneous | | | |
| | tissue disorder - other | | | |
| | (lesions on bilateral | | | |
| | ears) | | | |
| 14 | Back pain | CRS | Anemia | Neutropenia |
| | Pain in extremity | | Febrile neutropenia | Leukopenia |
| 16 | Colitis | Flu-like symptoms | Febrile neutropenia | Lymphopenia |
| | Hypocalcemia | CRS | | Neutropenia |
| | Hypokalemia | Hypoalbuminemia | | Thrombocytopenia |
| | Hypomagnesemia | Epistaxis | | Leukopenia |
| | Paresthesia | | | |
| | Confusion | | | |
| | Hoarseness | | | |
| | Sore throat | | | |
| | Hypotension | | | |
| 22 | Fatigue | Nausea | Febrile neutropenia | Lymphopenia |
| | Myalgia | CRS | | Leukopenia |
| | Insomnia | | | |

Cohort 3

| | | | | |
|---|---|---|---|---|
| 17 | Diarrhea | Chills | | Neutropenia |
| | Hypocalcemia | CRS | | Leukopenia |
| | Hypokalemia | Arthralgia | | |
| | Back pain | | | |
| | Headache | | | |
| | Peripheral sensory | | | |
| | neuropathy | | | |
| | Insomnia | | | |
| 19 | Nausea | Ear and labyrinth | CRS | |
| | Chills | disorders - other | Lymphopenia | |
| | | (seasonal allergies) | Hypophosphatemia | |
| | | Gastrointestinal | Hypertension | |
| | | disorders - other | | |
| | | (food poisoning) | | |
| | | Fever | | |
| | | Sinusitis | | |
| | | Upper respiratory | | |
| | | infection | | |
| 20 | Constipation | Fatigue | CRS | AST increased |
| | Diarrhea | ALT increased | Hyponatremia | |
| | Vomiting | Hypophosphatemia | | |
| | Chills | Dysphasia | | |
| | CPK increased | Lethargy | | |
| | Hypokalemia | Confusion | | |
| | Back pain | Hypotension | | |
| | Allergic rhinitis | | | |
| 21 | Alk phos increased | CRS | Lymphopenia | |
| | Hypocalcemia | Skin disorders - other | Neutropenia | |
| | Hyponatremia | (cellulitis) | Thrombocytopenia | |
| | Epistaxis | | Leukopenia | |
| 23 | Anal hemorrhage | CRS | Febrile neutropenia | |
| | Nausea | Abdominal pain | | |
| | Edema limbs | Colitis | | |
| | Hypoalbuminemia | Diarrhea | | |
| | Hypocalcemia | Vomiting | | |
| | Tremor | Pain | | |
| | | Thrombocytopenia | | |
| | | Hypokalemia | | |
| 25 | Nausea | Hypoalbuminemia | CRS | |
| | Facial pain | Hypokalemia | Hypocalcemia | |
| | Fatigue | Hypercalcemia | Papilledema | |
| | Hypomagnesemia | | | |
| | Headache | | | |
| | Peripheral sensory | | | |
| | neuropathy | | | |
| 27 | Diarrhea | Sinus bradycardia | CRS | Anemia |
| | Nausea | Edema limbs | SVT | Thrombocytopenia |
| | Oral pain | Urinary tract infection | AST increased | Hyperglycemia |
| | Fatigue | Creatinine increased | Ejection fraction | Hypocalcemia |
| | Pain | Neutropenia | decreased | Hypokalemia |
| | Infections - other | Hypernatremia | Lymphopenia | Pleural |
| | (upper respiratory | Wheezing | Leukopenia | hemorrhage |
| | infection) | | Hypoalbuminemia | |
| | Back pain | | Hyponatremia | |
| | Myalgia | | Encephalopathy | |
| | Pain in extremity | | Hypertension | |
| | Dry skin | | | |
| | Hematoma | | | |
| 29 | Nausea | Chills | Abdominal pain | Lymphopenia |
| | Fatigue | CRS | Hyponatremia | Leukopenia |
| | Pain | Hypoalbuminemia | Hypophosphatemia | |
| | Respiratory disorders - | | | |
| | Other (scratchy | | | |
| | throat, slight cough) | | | |
| 32 | Nausea | Diarrhea | Anemia | Lymphopenia |
| | Fatigue | Encephalopathy | CRS | Thrombocytopenia |
| | Alopecia | Allergic rhinitis | Neutropenia | Leukopenia |
| | | | Hypoalbuminemia | |
| | | | Hypocalcemia | |
| | | | Hyponatremia | |
| | | | Hypophosphatemia | |
| 33 | Oral pain | Chills | Febrile neutropenia | Neutropenia |
| | Diarrhea | CRS | | |
| | Fatigue | Hypoalbuminemia | | |
| | Flu-like symptoms | | | |
| | Arthralgia | | | |
| | Flank pain | | | |
| | Allergic rhinitis | | | |
| 34 | Diarrhea | CRS | Leukopenia | Lymphopenia |
| | Nausea | Thrombocytopenia | Hypophosphatemia | Neutropenia |
| | Sinus tachycardia | Hypocalcemia | Hyopnatremia | |
| | Confusion | Flu-like symptoms | | |
| | ALT increased | AST increased | | |

All events regardless of attribution are listed. If an event occurred more than once in same patient, highest grade is reported.
Alk phos = alkaline phosphatase; ALT = alanine aminotransferase; AST = aspartate aminotransferase; CPK = creatine phosphokinase; CRS = cytokine release syndrome; DIC = disseminated intravascular coagulation; NOS = not otherwise specified; RPLS = reversible posterior leukoencephalopathy syndrome (also known as posterior reversible encephalopathy syndrome (PRES)); SQ = subcutaneous; SVT = supraventricular tachycardia; UTI = urinary tract infection

TABLE 45
Characteristics of peripheral blood CART-BCMA+ cells at peak expansion

| | | | | | | |
|---|---|---|---|---|---|---|
| | Day of | % CAR+ | % CAR+ | % CAR+ | % HLADR+ | Best |
| Sub. | peak | of CD3+ | of CD4+ | of CD8+ | of CAR+ | response |

Cohort 1

| | | | | | | |
|---|---|---|---|---|---|---|
| 01 | 10 | 89.5 | 8.6 | 92.3 | 97 | sCR |
| 02 | 9 | 2.8 | 1.4 | 5.0 | 82 | MR |
| 03 | 14 | 76.2 | 13.7 | 85.9 | 97 | VGPR |
| 07 | 10 | 29.2 | 7.3 | 39.3 | 89 | PR |
| 08 | 16 | 9.3 | 0.4 | 16.9 | 95 | PD |
| 09 | 11 * | * | * | * | * | SD |
| 10 | 30 | 1.9 | 0.1 | 2.0 | 21 | PD |
| 11 | 8 | 18.2 | 14.6 | 25.2 | 94 | MR |
| 15 | 10 | 28.1 | 6.3 | 51.0 | 96 | VGPR |

Cohort 2

| | | | | | | |
|---|---|---|---|---|---|---|
| 12 | 10 | 2.0 | 0.8 | 2.3 | 76 | SD |
| 13 | 13 | 8.4 | 2.9 | 13.2 | 92 | MR |
| 14 | 10 | 7.8 | 3.5 | 10.6 | 95 | SD |
| 16 | 14 | 47.1 | 12.1 | 50.3 | 98 | PR |
| 22 | 9 | 4.3 | 0.6 | 8.6 | 94 | SD |

Cohort 3

| | | | | | | |
|---|---|---|---|---|---|---|
| 17 | 9 | 22.1 | 10.4 | 27.4 | 96 | PR |
| 19 | 15 | 9.7 | 8.9 | 10.2 | 87 | CR |
| 20 | 15 | 59.2 | 22.4 | 65.1 | 99 | VGPR |
| 21 | 9 | 16.0 | 9.2 | 19.9 | 97 | SD |
| 23 | 10 | 13.8 | 6.6 | 17.3 | 93 | MR |
| 25 | 10 | 5.1 | 3.8 | 5.9 | 85 | PR |
| 27 | 14 | 42.9 | 4.9 | 47.3 | 88 | VGPR |
| 29 | 7 | 4.1 | 2.8 | 15.0 | 77 | SD |
| 32 | 10 | 36.2 | 6.1 | 46.4 | 97 | MR |
| 33 | 11 | 41.8 | 29.8 | 46.9 | 91 | PR |
| 34 | ** | ** | ** | ** | ** | VGPR |

CART-BCMA cells were assessed by flow cytometry as in FIG. 38. At day of peak expansion, the frequency of CAR+ cells within CD3+, CD4+, and CD8+ populations are listed. Activation status at peak expansion (as measured by % of CAR+ cells expressing HLA-DR) is also shown. MR = minimal response; PD = progressive disease; PR = partial response; sCR = stringent complete response; SD = stable disease; VGPR = very good partial response
* Peak determined by qPCR; CAR+ cells not detectable by flow.
** No sample available between days 10-21 so peak could not be determined.

TABLE 46
CART-BCMA engraftment by qPCR in blood, bone marrow, and other sites

| | | | | | |
|---|---|---|---|---|---|
| | Day 28 | Day 28 | 3 month | 3 month | |
| Sub. | blood | BM | blood | BM | Other (site, day) |

Cohort 1

| | | | | | |
|---|---|---|---|---|---|
| 01 | 23447.33 | 10458.66 | 4373.95 | n/a | n/a |
| 02 | 454.57 | 383.62 | 334.90 | n/a | n/a |
| 03 | 220081.08* | 109964.97* | 9517.67 | 9934.97 | CSF, D4: 3285.88 |
| | | | | | CSF, D16: 158038.74 |
| | | | | | Pleural fluid, D8: 23941.97 |
| | | | | | Pleural fluid, D18: 144516.62 |
| 07 | 1757.60 | 2140.31 | n/a | n/a | n/a |
| 08 | n/a | n/a | n/a | n/a | n/a |
| 09 | 32.15 | 16.75 | n/a | n/a | n/a |
| 10 | 62.64 | 0.00 | n/a | n/a | n/a |
| 11 | 731.44 | n/a | 218.26 | n/a | n/a |
| 15 | 724.49 | 1084.16 | 32.58 | 99.48 | n/a |

Cohort 2

| | | | | | |
|---|---|---|---|---|---|
| 12 | 140.60 | 25.59 | n/a | n/a | n/a |
| 13 | 193.80 | 43.64 | 94.70 | 27.04 | n/a |
| 14 | 66.69 | 255.76 | 8.80 | 0.00 | n/a |
| 16 | 25919.10 | 22077.89 | n/a | n/a | n/a |
| 22 | 34.56 | 22.09 | 77.71 | 63.76 | n/a |

Cohort 3

| | | | | | |
|---|---|---|---|---|---|
| 17 | 1639.98 | 1398.82 | 1392.25 | 649.69 | n/a |
| 19 | 12987.83 | 6578.03 | 153.88 | 117.53 | n/a |
| 20 | 43463.65 | 28086.46 | 4107.95 | 5223.76 | n/a |
| 21 | 8372.96 | 1161.92 | 96.11 | n/a | n/a |
| 23 | 5946.81 | n/a | 102.68 | n/a | n/a |
| 25 | 256.33 | 259.97 | 149.20 | 160.33 | n/a |
| 27 | 51014.95 | 41242.37 | 14271.48 | 9634.66 | Pleural fluid, D15: 58511.99 |
| 29 | 738.84 | 210.05 | n/a | n/a | n/a |
| 32 | 6983.98 | 7055.94 | 58.15 | 15.72 | n/a |
| 33 | 7539.99 | 5142.13 | 230.66 | 39.09 | n/a |
| 34 | 5199.07 | 1512.03 | n/a | n/a | n/a |

CART-BCMA levels (copies/μg genomic DNA) were generally comparable in blood and marrow at tested timepoints. CART-BCMA was found at high levels in CSF and pleural fluid of subject 03, and pleural fluid of subject 27.
BM = bone marrow; CSF = cerebrospinal fluid. n/a = not available.
*Assays performed on day 45.

TABLE 47
Peak fold increase in serum cytokines and
severity of cytokine release syndrome (CRS)

| | | Median peak | |
|---|---|---|---|
| | Median peak | fold increase: | |
| | fold increase: | CRS Gr 3-4 or | |
| Cytokine | CRS Gr 0-2 | Gr 2 + toci | p-value |
| IL-6 | 3.88 | 76.26 | <0.0001 |
| IFN-γ | 1.26 | 11.95 | <0.0001 |
| IL-2Rα | 4.13 | 18.40 | <0.0001 |
| MIP-1α | 1.35 | 3.47 | <0.0001 |
| IL-15 | 1.71 | 12.81 | 0.0004 |
| IL-1RA | 2.33 | 19.68 | 0.0036 |
| MCP-1 | 2.11 | 6.99 | 0.0044 |
| GM-CSF | 2.69 | 36.27 | 0.0052 |
| IL-1β | 1.28 | 2.23 | 0.0052 |
| MIG | 6.81 | 39.14 | 0.008 |
| MIP-1β | 1.49 | 2.39 | 0.013 |
| IL-5 | 2.84 | 35.32 | 0.019 |
| VEGF | 1.93 | 3.68 | 0.022 |
| IL-17 | 1.16 | 3.13 | 0.026 |
| IL-7 | 2.24 | 6.18 | 0.10 |
| IP-10 | 6.63 | 10.97 | 0.10 |
| IL-8 | 8.65 | 30.72 | 0.20 |
| IL-4 | 1.29 | 1.95 | 0.24 |
| IL-10 | 13.84 | 15.82 | 0.53 |

Serum cytokine concentrations in μg/ml through day 28 were measured by Luminex assay. The median peak fold increase over baseline for each cytokine listed for subjects with no CRS, grade 1 CRS, or grade 2 CRS not receiving tocilizumab (CRS gr 0-2) was compared to median peak fold increase for subjects with grade 3-4 CRS or grade 2 CRS receiving tocilizumab (CRS Gr 3-4 or Gr 2 + toci). Exact p-value by Mann-Whitney test is listed when applicable.

TABLE 48
Peak fold increase in serum cytokines and neurotoxicity

| | Median peak | Median peak | |
|---|---|---|---|
| | fold increase: | fold increase: | |
| Cytokine | No neurotox | Any neurotox | p-value |
| IL-6 | 3.92 | 76.26 | 0.0002 |
| IFN-γ | 1.28 | 15.77 | 0.0002 |
| IL-1RA | 2.33 | 19.68 | 0.0015 |
| MIP-1α | 1.53 | 3.47 | 0.006 |
| GM-CSF | 3.46 | 36.27 | 0.013 |
| IL-15 | 1.76 | 10.54 | 0.016 |
| IL-1β | 1.32 | 3.70 | 0.018 |
| IP-10 | 5.80 | 20.44 | 0.019 |
| IL-7 | 3.29 | 10.28 | 0.019 |
| IL-2Rα | 4.46 | 20.86 | 0.019 |
| VEGF | 1.93 | 3.68 | 0.050 |
| MIP-1β | 1.56 | 2.24 | 0.056 |
| MIG | 7.17 | 39.14 | 0.057 |
| MCP-1 | 2.13 | 6.41 | 0.066 |
| IL-8 | 8.65 | 36.77 | 0.12 |
| IL-17 | 1.32 | 1.57 | 0.19 |
| IL-5 | 5.15 | 8.54 | 0.26 |
| IL-4 | 1.47 | 2.20 | 0.40 |
| IL-10 | 13.70 | 27.51 | 0.41 |

Serum cytokine concentrations in μg/ml through day 28 were measured by Luminex assay.
The median peak fold increase over baseline for each cytokine listed for subjects with no neurotoxicity (neurotox) was compared to median peak fold increase for subjects with any grade neurotoxicity. Exact p-value by Mann-Whitney test is listed.

TABLE 49
Details of BCMA expression on myeloma cells

| | | | | | | | | | | |
|---|---|---|---|---|---|---|---|---|---|---|
| | | Pre | Pre | | D 28 | D 28 | | D 90 | D 90 | |
| | Pre | FMO | BCMA | D 28 | FMO | BCMA | D 90 | BCMA | BCMA | Best |
| Sub | %+ | MFI | MFI | %+ | MFI | MFI | % + | MFI | MFI | response |

Cohort 1

| | | | | | | | | | | |
|---|---|---|---|---|---|---|---|---|---|---|
| 01 | 95 | 568 | 10864 | n/a | n/a | n/a | n/a | n/a | n/a | sCR |
| 02 | 93 | 355 | 2375 | 97 | 483 | 3254 | n/a | n/a | n/a | MR |
| 03 | 84 | 265 | 1873 | n/a | n/a | n/a | 19* | 78* | 268* | VGPR |
| 07 | n/a | n/a | n/a | 84 | 273 | 1426 | n/a | n/a | n/a | PR |
| 08 | 99 | 124 | 6859 | n/a | n/a | n/a | n/a | n/a | n/a | PD |
| 09 | 28 | 53 | 206 | 94 | 204 | 1116 | n/a | n/a | n/a | SD |
| 10 | 83 | 192 | 1998 | 99 | 54 | 2140 | n/a | n/a | n/a | PD |
| 11 | 81 | 332 | 1844 | 62 | 49 | 832 | n/a | n/a | n/a | MR |
| 15 | 99 | 249 | 24842 | n/a | n/a | n/a | 100 | 362 | 30685 | VGPR |

Cohort 2

| | | | | | | | | | | |
|---|---|---|---|---|---|---|---|---|---|---|
| 12 | 100 | −142 | 6755 | 100 | 187 | 7268 | n/a | n/a | n/a | SD |
| 13 | n/a | n/a | n/a | n/a | n/a | n/a | n/a | n/a | n/a | MR |
| 14 | 99 | 192 | 4317 | 98 | 172 | 2388 | n/a | n/a | n/a | SD |
| 16 | 97 | 366 | 4039 | 48 | 394 | 850 | 93 | 488 | 3819 | PR |
| 22 | 100 | 321 | 5947 | 99 | 271 | 4947 | 100 | 126 | 5599 | SD |

Cohort 3

| | | | | | | | | | | |
|---|---|---|---|---|---|---|---|---|---|---|
| 17 | 87 | 646 | 2667 | 27 | 295 | 784 | 76 | 350 | 1543 | PR |
| 19 | 98 | 429 | 2923 | 65 | 316 | 992 | n/a | n/a | n/a | CR |
| 20 | 89 | 394 | 2643 | 29 | 369 | 944 | 36 | 185 | 377 | VGPR |
| 21 | 99 | 314 | 2704 | 86 | 252 | 1108 | n/a | n/a | n/a | SD |
| 23 | n/a | n/a | n/a | n/a | n/a | n/a | n/a | n/a | n/a | MR |
| 25 | 97 | 283 | 4000 | 54 | 259 | 833 | 92 | 223 | 2501 | PR |
| 27 | 100 | 618 | 6548 | 74 | 242 | 964 | 70 | 159 | 616 | VGPR |
| 29 | n/a | n/a | n/a | n/a | n/a | n/a | n/a | n/a | n/a | SD |
| 32 | 92 | 176 | 3482 | 85 | 169 | 1472 | n/a | n/a | n/a | MR |
| 33 | n/a | n/a | n/a | n/a | n/a | n/a | n/a | n/a | n/a | PR |
| 34 | 100 | 303 | 17109 | 92 | 1607 | 5001 | 100 | 309 | 11232 | VGPR |

Bone marrow myeloma cells were gated and BCMA expression analyzed as per FIG. 55. The percentage of myeloma cells expressing BCMA (% +), as well as the mean fluorescence intensity (MFI) for BCMA and FMO (fluorescence minus one) negative control are depicted, n/a = not available. Pre = pre-treatment. D 28 = day 28 post-treatment. D 90 = day 90 post-treatment. Sub = subject.
*actually D 164.

### EQUIVALENTS

[1309] The disclosures of each and every patent, patent application, and publication cited herein are hereby incorporated herein by reference in their entirety. While this invention has been disclosed with reference to specific aspects, it is apparent that other aspects and variations of this invention may be devised by others skilled in the art without departing from the true spirit and scope of the invention. The appended claims are intended to be construed to include all such aspects and equivalent variations.

What is claimed is:

1. A method of evaluating or predicting a subject's responsiveness to a BCMA CAR-expressing cell therapy, wherein the subject has a disease associated with the expression of BCMA, comprising:
acquiring a value for one, two, three, four, five, or all of:
(i) the level or activity of CD4+ immune effector cells (e.g., CD4+ T cells) relative to the level or activity of CD8+ immune effector cells (e.g., CD8+ T cells) in the subject, e.g., in a sample from the subject (e.g., an apheresis sample (e.g., a leukapheresis sample), in a seed culture at the start of the manufacturing of the BCMA CAR-expressing cell therapy (e.g., a leukapheresis sample after monocytes are removed using elutriation)), or in the subject's peripheral blood and/or bone marrow prior to the administration of the BCMA CAR-expressing cell therapy,
(ii) the level or activity of CD8+ Tscm (stem cell memory T cells) in the subject, e.g., in a sample from the subject (e.g., an apheresis sample (e.g., a leukapheresis sample) or a seed culture at the start of the manufacturing of the BCMA CAR-expressing cell therapy (e.g., a leukapheresis sample after monocytes are removed using elutriation)),
(iii) the level or activity of HLADR-CD95+CD27+CD8+ cells in the subject, e.g., in a sample from the subject (e.g., an apheresis sample (e.g., a leukapheresis sample) or a seed culture at the start of the manufacturing of the BCMA CAR-expressing cell therapy (e.g., a leukapheresis sample after monocytes are removed using elutriation)),
(iv) the level or activity of CD45RO−CD27+CD8+ cells in the subject, e.g., in a sample from the subject (e.g., an apheresis sample (e.g., a leukapheresis sample) or a seed culture at the start of the manufacturing of the BCMA CAR-expressing cell therapy (e.g., a leukapheresis sample after monocytes are removed using elutriation)),
(v) the level or activity of CCR7+CD45RO−CD27+CD8+ cells in the subject, e.g., in a sample from the subject (e.g., an apheresis sample (e.g., a leukapheresis sample) or a seed culture at the start of the manufacturing of the BCMA CAR-expressing cell therapy (e.g., a leukapheresis sample after monocytes are removed using elutriation)), or
(vi) the proliferation of seeded cells from the subject during manufacturing of the BCMA CAR-expressing cell therapy, e.g., as measured by population doublings by day 9 (PDL9), wherein:
(a) an increase in the value of one, two, three, four, five, or all of (i)-(vi), as compared to a reference value, e.g., a non-responder reference value, is indicative or predictive of increased responsiveness of the subject to the BCMA CAR-expressing cell therapy; or
(b) a decrease in the value of one, two, three, four, five, or all of (i)-(vi), as compared to a reference value, e.g., a responder reference value, is indicative or predictive of decreased responsiveness of the subject to the BCMA CAR-expressing cell therapy,
thereby evaluating or predicting the subject's responsiveness to the BCMA CAR-expressing cell therapy.

2. The method of claim 1, wherein the increase in the value of one, two, three, four, five, or all of (i)-(vi), as compared to a reference value, e.g., a non-responder reference value, is indicative or predictive of one, two, three, or all of:
(a) increased responsiveness of the subject to the BCMA CAR-expressing cell therapy;
(b) the subject as a responder of the BCMA CAR-expressing cell therapy;
(c) the subject as suitable for the BCMA CAR-expressing cell therapy; or
(d) increased expansion of the BCMA CAR-expressing cell therapy in the subject, e.g., as measured by an assay disclosed herein, e.g., as measured by the copy number of CAR transgenes per μg DNA using qPCR.

3. The method of claim 1 or 2, wherein the decrease in the value of one, two, three, four, five, or all of (i)-(vi), as compared to a reference value, e.g., a responder reference value, is indicative or predictive of one, two, or all of:
(a) decreased responsiveness of the subject to the BCMA CAR-expressing cell therapy;
(b) the subject as a non-responder of the BCMA CAR-expressing cell therapy; or
(c) decreased expansion of the BCMA CAR-expressing cell therapy in the subject, e.g., as measured by an assay disclosed herein, e.g., as measured by the copy number of CAR transgenes per μg DNA using qPCR.

4. The method of any one of claims 1-3, wherein the value for the level or activity of CD4+ immune effector cells (e.g., CD4+ T cells) relative to the level or activity of CD8+ immune effector cells (e.g., CD8+ T cells) comprises a ratio of the amount of CD4+ immune effector cells (e.g., CD4+ T cells) to the amount of CD8+ immune effector cells (e.g., CD8+ T cells), e.g., as measured by an assay disclosed herein, e.g., flow cytometry.

5. The method of claim 4, wherein the ratio being:
(1) greater than or equal to 1 (e.g., between 1 and 5, e.g., between 1 and 3.5); or
(2) greater than or equal to 1.6 (e.g., between 1.6 and 5, e.g., between 1.6 and 3.5),
is indicative or predictive of one, two, three, or all of:
(a) increased responsiveness of the subject to the BCMA CAR-expressing cell therapy;
(b) the subject as a responder of the BCMA CAR-expressing cell therapy;
(c) the subject as suitable for the BCMA CAR-expressing cell therapy; or
(d) increased expansion of the BCMA CAR-expressing cell therapy in the subject, e.g., as measured by an assay disclosed herein, e.g., as measured by the copy number of CAR transgenes per μg DNA using qPCR.

6. The method of claim 4 or 5, wherein the ratio being less than 1 (e.g., between 0.001 and 1) is indicative or predictive of one, two, or all of:
(a) decreased responsiveness of the subject to the BCMA CAR-expressing cell therapy;
(b) the subject as a non-responder of the BCMA CAR-expressing cell therapy; or
(c) decreased expansion of the BCMA CAR-expressing cell therapy in the subject, e.g., as measured by an assay disclosed herein, e.g., as measured by the copy number of CAR transgenes per μg DNA using qPCR.

7. The method of any one of claims 1-6, wherein the value for the level or activity of CD8+ Tscm (stem cell memory T cells) comprises the percentage of CD8+ Tscm (stem cell memory T cells) among CD8+ T cells, e.g., as measured by an assay disclosed herein, e.g., flow cytometry.

8. The method of any one of claims 1-7, wherein the value for the level or activity of HLADR-CD95+CD27+CD8+ cells comprises the percentage of HLADR-CD95+CD27+CD8+ cells among CD8+ T cells, e.g., as measured by an assay disclosed herein, e.g., flow cytometry.

9. The method of claim 8, wherein the percentage of HLADR-CD95+CD27+CD8+ cells among CD8+ T cells being greater than or equal to 25% (e.g., between 30% and 90%, e.g., between 35% and 85%, e.g., between 40% and 80%, e.g., between 45% and 75%, e.g., between 50% and 75%) is indicative or predictive of one, two, three, or all of:
(a) increased responsiveness of the subject to the BCMA CAR-expressing cell therapy;
(b) the subject as a responder of the BCMA CAR-expressing cell therapy;
(c) the subject as suitable for the BCMA CAR-expressing cell therapy; or
(d) increased expansion of the BCMA CAR-expressing cell therapy in the subject, e.g., as measured by an assay disclosed herein, e.g., as measured by the copy number of CAR transgenes per μg DNA using qPCR.

10. The method of claim 8 or 9, wherein the percentage of HLADR-CD95+CD27+CD8+ cells among CD8+ T cells being less than 25% (e.g., between 0.1% and 25%, e.g., between 0.1% and 22%, e.g., between 0.1% and 20%, e.g., between 0.1% and 18%, e.g., between 0.1% and 15%)) is indicative or predictive of one, two, or all of:
(a) decreased responsiveness of the subject to the BCMA CAR-expressing cell therapy;
(b) the subject as a non-responder of the BCMA CAR-expressing cell therapy; or
(c) decreased expansion of the BCMA CAR-expressing cell therapy in the subject, e.g., as measured by an assay disclosed herein, e.g., as measured by the copy number of CAR transgenes per μg DNA using qPCR.

11. The method of any one of claims 1-10, wherein the value for the level or activity of CD45RO− CD27+CD8+ cells comprises the percentage of CD45RO−CD27+CD8+ cells among CD8+ T cells, e.g., as measured by an assay disclosed herein, e.g., flow cytometry.

12. The method of claim 11, wherein the percentage of CD45RO−CD27+CD8+ cells among CD8+ T cells being greater than or equal to 20% (e.g., between 20% and 90%, e.g., between 20% and 80%, e.g., between 20% and 70%, e.g., between 20% and 60%) is indicative or predictive of one, two, three, or all of:
(a) increased responsiveness of the subject to the BCMA CAR-expressing cell therapy;
(b) the subject as a responder of the BCMA CAR-expressing cell therapy;
(c) the subject as suitable for the BCMA CAR-expressing cell therapy; or
(d) increased expansion of the BCMA CAR-expressing cell therapy in the subject, e.g., as measured by an assay disclosed herein, e.g., as measured by the copy number of CAR transgenes per μg DNA using qPCR.

13. The method of claim 11 or 12, wherein the percentage of CD45RO−CD27+CD8+ cells among CD8+ T cells being less than 20% (e.g., between 0.1% and 20%, e.g., between 0.1% and 18%, e.g., between 0.1% and 15%, e.g., between 0.1% and 12%, e.g., between 0.1% and 10%) is indicative or predictive of one, two, or all of:
(a) decreased responsiveness of the subject to the BCMA CAR-expressing cell therapy;
(b) the subject as a non-responder of the BCMA CAR-expressing cell therapy; or
(c) decreased expansion of the BCMA CAR-expressing cell therapy in the subject, e.g., as measured by an assay disclosed herein, e.g., as measured by the copy number of CAR transgenes per μg DNA using qPCR.

14. The method of any one of claims 1-13, wherein the value for the level or activity of CCR7+CD45RO−CD27+CD8+ cells comprises the percentage of CCR7+CD45RO−CD27+CD8+ cells among CD8+ T cells, e.g., as measured by an assay disclosed herein, e.g., flow cytometry.

15. The method of claim 14, wherein the percentage of CCR7+CD45RO−CD27+CD8+ cells among CD8+ T cells being greater than or equal to 15% (e.g., between 15% and 90%, e.g., between 15% and 80%, e.g., between 15% and 70%, e.g., between 15% and 60%, e.g., between 15% and 50%) is indicative or predictive of one, two, three, or all of:
(a) increased responsiveness of the subject to the BCMA CAR-expressing cell therapy;
(b) the subject as a responder of the BCMA CAR-expressing cell therapy;
(c) the subject as suitable for the BCMA CAR-expressing cell therapy; or
(d) increased expansion of the BCMA CAR-expressing cell therapy in the subject, e.g., as measured by an assay disclosed herein, e.g., as measured by the copy number of CAR transgenes per μg DNA using qPCR.

16. The method of claim 14 or 15, wherein the percentage of CCR7+CD45RO−CD27+CD8+ cells among CD8+ T cells being less than 15% (e.g., between 0.1% and 15%, e.g., between 0.1% and 12%, e.g., between 0.1% and 10%, e.g., between 0.1% and 8%) is indicative or predictive of one, two, or all of:
(a) decreased responsiveness of the subject to the BCMA CAR-expressing cell therapy;
(b) the subject as a non-responder of the BCMA CAR-expressing cell therapy; or
(c) decreased expansion of the BCMA CAR-expressing cell therapy in the subject, e.g., as measured by an assay disclosed herein, e.g., as measured by the copy number of CAR transgenes per μg DNA using qPCR.

17. The method of any one of claims 1-16, wherein the value for the proliferation of seeded cells from the subject during manufacturing of the BCMA CAR-expressing cell therapy comprises the fold expansion of seeded cells from the subject during manufacturing (e.g., total cell counts at the end of manufacturing relative to at the start of manufacturing) of the BCMA CAR-expressing cell therapy, e.g., as measured by an assay disclosed herein, e.g., as measured by cell counting.

18. The method of any one of claims 1-17, further comprising performing:
manufacturing the BCMA CAR-expressing cell therapy using cells (e.g., T cells) from the subject and administering the BCMA CAR-expressing cell therapy to the subject; or
administering, e.g., initiating administering or continuing administering, the BCMA CAR-expressing cell therapy to the subject, when:
(a) the subject was indicated or predicted to have increased responsiveness to the BCMA CAR-expressing cell therapy;
(b) the subject was indicated or predicted as a responder of the BCMA CAR-expressing cell therapy;
(c) the subject was indicated or predicted as suitable for the BCMA CAR-expressing cell therapy; or
(d) the BCMA CAR-expressing cell therapy was indicated or predicted to have increased expansion in the subject, e.g., as measured by an assay disclosed herein, e.g., as measured by the copy number of CAR transgenes per pg DNA using qPCR.

19. The method of any one of claims 1-17, further comprising performing one, two, three, four, five, six, seven, or all of:
administering an altered dosing regimen of the BCMA CAR-expressing cell therapy (e.g., a dosing regimen with a higher dose and/or more frequent administration than a reference dosing regimen) to the subject;
administering a second therapy (e.g., a second therapy that is not the BCMA CAR-expressing cell therapy) to the subject;
administering the BCMA CAR-expressing cell therapy and a second therapy to the subject;
discontinuing administration of the BCMA CAR-expressing cell therapy and optionally administering a second therapy to the subject;
modifying a manufacturing process of the BCMA CAR-expressing cell therapy, e.g., enriching for CD4+ immune effector cells (e.g., CD4+ T cells) relative to CD8+ immune effector cells (CD8+ T cells) prior to introducing a nucleic acid encoding a BCMA CAR, and administering the BCMA CAR-expressing cell therapy generated by the modified manufacturing process to the subject;
modifying a manufacturing process of the BCMA CAR-expressing cell therapy, e.g., enriching for CD8+ Tscm (e.g., HLADR-CD95+CD27+CD8+ cells, CD45RO−CD27+CD8+ cells, or CCR7+CD45RO−CD27+CD8+ cells) prior to introducing a nucleic acid encoding a BCMA CAR, and administering the BCMA CAR-expressing cell therapy generated by the modified manufacturing process to the subject;
modifying a manufacturing process of the BCMA CAR-expressing cell therapy, e.g., increasing the proliferation of seeded cells from the subject during the manufacturing of the BCMA CAR-expressing cell therapy, and administering the BCMA CAR-expressing cell therapy generated by the modified manufacturing process to the subject; or
administering a pretreatment to the subject, wherein the pretreatment increases the ratio of the amount of CD4+ immune effector cells (e.g., CD4+ T cells) to the amount of CD8+ immune effector cells (e.g., CD8+ T cells) in the subject, e.g., in a sample from the subject (e.g., an apheresis sample (e.g., a leukapheresis sample), in a seed culture at the start of the manufacturing of the BCMA CAR-expressing cell therapy (e.g., a leukapheresis sample after monocytes are removed using elutriation)), or in the subject's peripheral blood and/or bone marrow prior to the administration of the BCMA CAR-expressing cell therapy, e.g., the pretreatment increases the ratio to greater than or equal to 1.6 (e.g., between 1.6 and 5, e.g., between 1.6 and 3.5), manufacturing the BCMA CAR-expressing cell therapy using cells (e.g., T cells) from the subject, and administering the BCMA CAR-expressing cell therapy to the subject, when:
(a) the subject was indicated or predicted to have decreased responsiveness to the BCMA CAR-expressing cell therapy;
(b) the subject was indicated or predicted as a non-responder of the BCMA CAR-expressing cell therapy; or
(c) the BCMA CAR-expressing cell therapy was indicated or predicted to have decreased expansion in the subject, e.g., as measured by an assay disclosed herein, e.g., as measured by the copy number of CAR transgenes per pg DNA using qPCR.

20. A method of treating a subject having a disease associated with the expression of BCMA, comprising:
responsive to an increased value for one, two, three, four, five, or all of:
(i) the level or activity of CD4+ immune effector cells (e.g., CD4+ T cells) relative to the level or activity of CD8+ immune effector cells (e.g., CD8+ T cells) in the subject, e.g., in a sample from the subject (e.g., an apheresis sample (e.g., a leukapheresis sample), in a seed culture at the start of the manufacturing of a BCMA CAR-expressing cell therapy (e.g., a leukapheresis sample after monocytes are removed using elutriation)), or in the subject's peripheral blood and/or bone marrow prior to the administration of the BCMA CAR-expressing cell therapy,
(ii) the level or activity of CD8+ Tscm (stem cell memory T cells) in the subject, e.g., in a sample from the subject (e.g., an apheresis sample (e.g., a leukapheresis sample) or a seed culture at the start of the manufacturing of a BCMA CAR-expressing cell therapy (e.g., a leukapheresis sample after monocytes are removed using elutriation)),
(iii) the level or activity of HLADR-CD95+CD27+CD8+ cells in the subject, e.g., in a sample from the subject (e.g., an apheresis sample (e.g., a leukapheresis sample) or a seed culture at the start of the manufacturing of a BCMA CAR-expressing cell therapy (e.g., a leukapheresis sample after monocytes are removed using elutriation)),
(iv) the level or activity of CD45RO−CD27+CD8+ cells in the subject, e.g., in a sample from the subject (e.g., an apheresis sample (e.g., a leukapheresis sample) or a seed culture at the start of the manufacturing of a BCMA CAR-expressing cell therapy (e.g., a leukapheresis sample after monocytes are removed using elutriation)),
(v) the level or activity of CCR7+CD45RO−CD27+CD8+ cells in the subject, e.g., in a sample from the subject (e.g., an apheresis sample (e.g., a leukapheresis sample) or a seed culture at the start of the manufacturing of a BCMA CAR-expressing cell therapy (e.g., a leukapheresis sample after monocytes are removed using elutriation)), or
(vi) the proliferation of seeded cells from the subject during manufacturing of a BCMA CAR-expressing cell therapy,
as compared to a reference value, e.g., a non-responder reference value, performing:
manufacturing a BCMA CAR-expressing cell therapy using cells (e.g., T cells) from the subject and administering the BCMA CAR-expressing cell therapy to the subject; or
administering, e.g., initiating administering or continuing administering, a BCMA CAR-expressing cell therapy to the subject,
thereby treating the subject having the disease associated with the expression of BCMA.

21. A method of treating a subject having a disease associated with the expression of BCMA, comprising:
responsive to a decreased value for one, two, three, four, five, or all of:
(i) the level or activity of CD4+ immune effector cells (e.g., CD4+ T cells) relative to the level or activity of CD8+ immune effector cells (e.g., CD8+ T cells) in the subject, e.g., in a sample from the subject (e.g., an apheresis sample (e.g., a leukapheresis sample), in a seed culture at the start of the manufacturing of a BCMA CAR-expressing cell therapy (e.g., a leukapheresis sample after monocytes are removed using elutriation)), or in the subject's peripheral blood and/or bone marrow prior to the administration of the BCMA CAR-expressing cell therapy,
(ii) the level or activity of CD8+ Tscm (stem cell memory T cells) in the subject, e.g., in a sample from the subject (e.g., an apheresis sample (e.g., a leukapheresis sample) or a seed culture at the start of the manufacturing of a BCMA CAR-expressing cell therapy (e.g., a leukapheresis sample after monocytes are removed using elutriation)),
(iii) the level or activity of HLADR-CD95+CD27+CD8+ cells in the subject, e.g., in a sample from the subject (e.g., an apheresis sample (e.g., a leukapheresis sample) or a seed culture at the start of the manufacturing of a BCMA CAR-expressing cell therapy (e.g., a leukapheresis sample after monocytes are removed using elutriation)),
(iv) the level or activity of CD45RO−CD27+CD8+ cells in the subject, e.g., in a sample from the subject (e.g., an apheresis sample (e.g., a leukapheresis sample) or a seed culture at the start of the manufacturing of a BCMA CAR-expressing cell therapy (e.g., a leukapheresis sample after monocytes are removed using elutriation)),
(v) the level or activity of CCR7+CD45RO−CD27+CD8+ cells in the subject, e.g., in a sample from the subject (e.g., an apheresis sample (e.g., a leukapheresis sample) or a seed culture at the start of the manufacturing of a BCMA CAR-expressing cell therapy (e.g., a leukapheresis sample after monocytes are removed using elutriation)), or
(vi) the proliferation of seeded cells from the subject during manufacturing of a BCMA CAR-expressing cell therapy,
as compared to a reference value, e.g., a responder reference value, performing one, two, three, four, five, six, seven, or all of:
administering an altered dosing regimen of a BCMA CAR-expressing cell therapy (e.g., a dosing regimen with a higher dose and/or more frequent administration than a reference dosing regimen) to the subject;
administering a second therapy (e.g., a second therapy that is not a BCMA CAR-expressing cell therapy) to the subject;
administering a BCMA CAR-expressing cell therapy and a second therapy to the subject;
discontinuing administration of a BCMA CAR-expressing cell therapy and optionally administering a second therapy to the subject;
modifying a manufacturing process of a BCMA CAR-expressing cell therapy, e.g., enriching for CD4+ immune effector cells (e.g., CD4+ T cells) relative to CD8+ immune effector cells (CD8+ T cells) prior to introducing a nucleic acid encoding a BCMA CAR, and administering the BCMA CAR-expressing cell therapy generated by the modified manufacturing process to the subject;
modifying a manufacturing process of a BCMA CAR-expressing cell therapy, e.g., enriching for CD8+ Tscm (e.g., HLADR-CD95+CD27+CD8+ cells, CD45RO−CD27+CD8+ cells, or CCR7+CD45RO−CD27+CD8+ cells) prior to introducing a nucleic acid encoding a BCMA CAR, and administering the BCMA CAR-expressing cell therapy generated by the modified manufacturing process to the subject;
modifying a manufacturing process of the BCMA CAR-expressing cell therapy, e.g., increasing the proliferation of seeded cells from the subject during the manufacturing of the BCMA CAR-expressing cell therapy, and administering the BCMA CAR-expressing cell therapy generated by the modified manufacturing process to the subject; or
administering a pretreatment to the subject, wherein the pretreatment increases the ratio of the amount of CD4+ immune effector cells (e.g., CD4+ T cells) to the amount of CD8+ immune effector cells (e.g., CD8+ T cells) in the subject, e.g., in a sample from the subject (e.g., an apheresis sample (e.g., a leukapheresis sample), a seed culture at the start of the manufacturing of a BCMA CAR-expressing cell therapy (e.g., a leukapheresis sample after monocytes are removed using elutriation)), or in the subject's peripheral blood and/or bone marrow prior to the administration of the BCMA CAR-expressing cell therapy, e.g., the pretreatment increases the ratio to greater than or equal to 1.6 (e.g., between 1.6 and 5, e.g., between 1.6 and 3.5), manufacturing the BCMA CAR-expressing cell therapy using cells (e.g., T cells) from the subject, and administering the BCMA CAR-expressing cell therapy to the subject,
thereby treating the subject having the disease associated with the expression of BCMA.

22. The method of claim 20, comprising: responsive to an increased value for one, two, three, four, five, or all of (i)-(vi), identifying or predicting one, two, three, or all of:
(a) the subject as having increased responsiveness to the BCMA CAR-expressing cell therapy;
(b) the subject as a responder of the BCMA CAR-expressing cell therapy;
(c) the subject as suitable for the BCMA CAR-expressing cell therapy; or
(d) the BCMA CAR-expressing cell therapy as having increased expansion in the subject, e.g., as measured by an assay disclosed herein, e.g., as measured by the copy number of CAR transgenes per pg DNA using qPCR.

23. The method of claim 21, comprising: response to a decreased value for one, two, three, four, five, or all of (i)-(vi), identifying or predicting one, two, or all of:
(a) the subject as having decreased responsiveness to the BCMA CAR-expressing cell therapy;
(b) the subject as a non-responder of the BCMA CAR-expressing cell therapy; or
(c) the BCMA CAR-expressing cell therapy as having decreased expansion in the subject, e.g., as measured by an assay disclosed herein, e.g., as measured by the copy number of CAR transgenes per pg DNA using qPCR.

24. The method of any one of claims 20-23, wherein the value for the level or activity of CD4+ immune effector cells (e.g., CD4+ T cells) relative to the level or activity of CD8+ immune effector cells (e.g., CD8+ T cells) comprises a ratio of the amount of CD4+ immune effector cells (e.g., CD4+ T cells) to the amount of CD8+ immune effector cells (e.g., CD8+ T cells), e.g., as measured by an assay disclosed herein, e.g., flow cytometry.

25. The method of claim 24, comprising:
responsive to the ratio being:
(1) greater than or equal to 1 (e.g., between 1 and 5, e.g., between 1 and 3.5); or
(2) greater than or equal to 1.6 (e.g., between 1.6 and 5, e.g., between 1.6 and 3.5), performing:
manufacturing a BCMA CAR-expressing cell therapy using cells (e.g., T cells) from the subject and administering the BCMA CAR-expressing cell therapy to the subject; or
administering, e.g., initiating administering or continuing administering, a BCMA CAR-expressing cell therapy to the subject.

26. The method of claim 24 or 25, comprising:
responsive to the ratio being less than 1 (e.g., between 0.001 and 1), performing one, two, three, four, five, six, seven, or all of:
administering an altered dosing regimen of a BCMA CAR-expressing cell therapy (e.g., a dosing regimen with a higher dose and/or more frequent administration than a reference dosing regimen) to the subject;
administering a second therapy (e.g., a second therapy that is not a BCMA CAR-expressing cell therapy) to the subject;
administering a BCMA CAR-expressing cell therapy and a second therapy to the subject;
discontinuing administration of a BCMA CAR-expressing cell therapy and optionally administering a second therapy to the subject;
modifying a manufacturing process of a BCMA CAR-expressing cell therapy, e.g., enriching for CD4+ immune effector cells (e.g., CD4+ T cells) relative to CD8+ immune effector cells (CD8+ T cells) prior to introducing a nucleic acid encoding a BCMA CAR, and administering the BCMA CAR-expressing cell therapy generated by the modified manufacturing process to the subject;
modifying a manufacturing process of a BCMA CAR-expressing cell therapy, e.g., enriching for CD8+ Tscm (e.g., HLADR-CD95+CD27+CD8+ cells, CD45RO−CD27+CD8+ cells, or CCR7+CD45RO−CD27+CD8+ cells) prior to introducing a nucleic acid encoding a BCMA CAR, and administering the BCMA CAR-expressing cell therapy generated by the modified manufacturing process to the subject;
modifying a manufacturing process of the BCMA CAR-expressing cell therapy, e.g., increasing the proliferation of seeded cells from the subject during the manufacturing of the BCMA CAR-expressing cell therapy, and administering the BCMA CAR-expressing cell therapy generated by the modified manufacturing process to the subject; or
administering a pretreatment to the subject, wherein the pretreatment increases the ratio of the amount of CD4+ immune effector cells (e.g., CD4+ T cells) to the amount of CD8+ immune effector cells (e.g., CD8+ T cells) in the subject, e.g., in a sample from the subject (e.g., an apheresis sample (e.g., a leukapheresis sample), in a seed culture at the start of the manufacturing of a BCMA CAR-expressing cell therapy (e.g., a leukapheresis sample after monocytes are removed using elutriation)), or in the subject's peripheral blood and/or bone marrow prior to the administration of the BCMA CAR-expressing cell therapy, e.g., the pretreatment increases the ratio to greater than or equal to 1.6 (e.g., between 1.6 and 5, e.g., between 1.6 and 3.5), manufacturing the BCMA CAR-expressing cell therapy using cells (e.g., T cells) from the subject, and administering the BCMA CAR-expressing cell therapy to the subject.

27. The method of any one of claims 20-26, wherein the value for the level or activity of CD8+ Tscm (stem cell memory T cells) comprises the percentage of CD8+ Tscm (stem cell memory T cells) among CD8+ T cells, e.g., as measured by an assay disclosed herein, e.g., flow cytometry.

28. The method of any one of claims 20-27, wherein the value for the level or activity of HLADR-CD95+CD27+CD8+ cells comprises the percentage of HLADR-CD95+CD27+CD8+ cells among CD8+ T cells, e.g., as measured by an assay disclosed herein, e.g., flow cytometry.

29. The method of claim 28, comprising:
responsive to the percentage of HLADR-CD95+CD27+CD8+ cells among CD8+ T cells being greater than or equal to 25% (e.g., between 30% and 90%, e.g., between 35% and 85%, e.g., between 40% and 80%, e.g., between 45% and 75%, e.g., between 50% and 75%), performing:
manufacturing a BCMA CAR-expressing cell therapy using cells (e.g., T cells) from the subject and administering the BCMA CAR-expressing cell therapy to the subject; or
administering, e.g., initiating administering or continuing administering, a BCMA CAR-expressing cell therapy to the subject.

30. The method of claim 28 or 29, comprising:
responsive to the percentage of HLADR-CD95+CD27+CD8+ cells among CD8+ T cells being less than 25% (e.g., between 0.1% and 25%, e.g., between 0.1% and 22%, e.g., between 0.1% and 20%, e.g., between 0.1% and 18%, e.g., between 0.1% and 15%), performing one, two, three, four, five, six, seven, or all of:
administering an altered dosing regimen of a BCMA CAR-expressing cell therapy (e.g., a dosing regimen with a higher dose and/or more frequent administration than a reference dosing regimen) to the subject;
administering a second therapy (e.g., a second therapy that is not a BCMA CAR-expressing cell therapy) to the subject;
administering a BCMA CAR-expressing cell therapy and a second therapy to the subject;
discontinuing administration of a BCMA CAR-expressing cell therapy and optionally administering a second therapy to the subject;
modifying a manufacturing process of a BCMA CAR-expressing cell therapy, e.g., enriching for CD4+ immune effector cells (e.g., CD4+ T cells) relative to CD8+ immune effector cells (CD8+ T cells) prior to introducing a nucleic acid encoding a BCMA CAR, and administering the BCMA CAR-expressing cell therapy generated by the modified manufacturing process to the subject;
modifying a manufacturing process of a BCMA CAR-expressing cell therapy, e.g., enriching for CD8+ Tscm (e.g., HLADR-CD95+CD27+CD8+ cells, CD45RO−CD27+CD8+ cells, or CCR7+CD45RO−CD27+CD8+ cells) prior to introducing a nucleic acid encoding a BCMA CAR, and administering the BCMA CAR-expressing cell therapy generated by the modified manufacturing process to the subject;
modifying a manufacturing process of the BCMA CAR-expressing cell therapy, e.g., increasing the proliferation of seeded cells from the subject during the manufacturing of the BCMA CAR-expressing cell therapy, and administering the BCMA CAR-expressing cell therapy generated by the modified manufacturing process to the subject; or
administering a pretreatment to the subject, wherein the pretreatment increases the ratio of the amount of CD4+ immune effector cells (e.g., CD4+ T cells) to the amount of CD8+ immune effector cells (e.g., CD8+ T cells) in the subject, e.g., in a sample from the subject (e.g., an apheresis sample (e.g., a leukapheresis sample), in a seed culture at the start of the manufacturing of a BCMA CAR-expressing cell therapy (e.g., a leukapheresis sample after monocytes are removed using elutriation)), or in the subject's peripheral blood and/or bone marrow prior to the administration of the BCMA CAR-expressing cell therapy, e.g., the pretreatment increases the ratio to greater than or equal to 1.6 (e.g., between 1.6 and 5, e.g., between 1.6 and 3.5), manufacturing the BCMA CAR-expressing cell therapy using cells (e.g., T cells) from the subject, and administering the BCMA CAR-expressing cell therapy to the subject.

31. The method of any one of claims 20-30, wherein the value for the level or activity of CD45RO−CD27+CD8+ cells comprises the percentage of CD45RO−CD27+CD8+ cells among CD8+ T cells, e.g., as measured by an assay disclosed herein, e.g., flow cytometry.

32. The method of claim 31, comprising:
responsive to the percentage of CD45RO−CD27+CD8+ cells among CD8+ T cells being greater than or equal to 20% (e.g., between 20% and 90%, e.g., between 20% and 80%, e.g., between 20% and 70%, e.g., between 20% and 60%), performing:
manufacturing a BCMA CAR-expressing cell therapy using cells (e.g., T cells) from the subject and administering the BCMA CAR-expressing cell therapy to the subject; or
administering, e.g., initiating administering or continuing administering, a BCMA CAR-expressing cell therapy to the subject.

33. The method of claim 31 or 32, comprising:
responsive to the percentage of CD45RO−CD27+CD8+ cells among CD8+ T cells being less than 20% (e.g., between 0.1% and 20%, e.g., between 0.1% and 18%, e.g., between 0.1% and 15%, e.g., between 0.1% and 12%, e.g., between 0.1% and 10%), performing one, two, three, four, five, six, seven, or all of:
administering an altered dosing regimen of a BCMA CAR-expressing cell therapy (e.g., a dosing regimen with a higher dose and/or more frequent administration than a reference dosing regimen) to the subject;
administering a second therapy (e.g., a second therapy that is not a BCMA CAR-expressing cell therapy) to the subject;
administering a BCMA CAR-expressing cell therapy and a second therapy to the subject;
discontinuing administration of a BCMA CAR-expressing cell therapy and optionally administering a second therapy to the subject;
modifying a manufacturing process of a BCMA CAR-expressing cell therapy, e.g., enriching for CD4+ immune effector cells (e.g., CD4+ T cells) relative to CD8+ immune effector cells (CD8+ T cells) prior to introducing a nucleic acid encoding a BCMA CAR, and administering the BCMA CAR-expressing cell therapy generated by the modified manufacturing process to the subject;
modifying a manufacturing process of a BCMA CAR-expressing cell therapy, e.g., enriching for CD8+ Tscm (e.g., HLADR-CD95+CD27+CD8+ cells, CD45RO−CD27+CD8+ cells, or CCR7+CD45RO−CD27+CD8+ cells) prior to introducing a nucleic acid encoding a BCMA CAR, and administering the BCMA CAR-expressing cell therapy generated by the modified manufacturing process to the subject;
modifying a manufacturing process of the BCMA CAR-expressing cell therapy, e.g., increasing the proliferation of seeded cells from the subject during the manufacturing of the BCMA CAR-expressing cell therapy, and administering the BCMA CAR-expressing cell therapy generated by the modified manufacturing process to the subject; or
administering a pretreatment to the subject, wherein the pretreatment increases the ratio of the amount of CD4+ immune effector cells (e.g., CD4+ T cells) to the amount of CD8+ immune effector cells (e.g., CD8+ T cells) in the subject, e.g., in a sample from the subject (e.g., an apheresis sample (e.g., a leukapheresis sample), in a seed culture at the start of the manufacturing of a BCMA CAR-expressing cell therapy (e.g., a leukapheresis sample after monocytes are removed using elutriation)), or in the subject's peripheral blood and/or bone marrow prior to the administration of the BCMA CAR-expressing cell therapy, e.g., the pretreatment increases the ratio to greater than or equal to 1.6 (e.g., between 1.6 and 5, e.g., between 1.6 and 3.5), manufacturing the BCMA CAR-expressing cell therapy using cells (e.g., T cells) from the subject, and administering the BCMA CAR-expressing cell therapy to the subject.

34. The method of any one of claims 20-33, wherein the value for the level or activity of CCR7+CD45RO−CD27+CD8+ cells comprises the percentage of CCR7+CD45RO−CD27+CD8+ cells among CD8+ T cells, e.g., as measured by an assay disclosed herein, e.g., flow cytometry.

35. The method of claim 34, comprising:
responsive to the percentage of CCR7+CD45RO−CD27+CD8+ cells among CD8+ T cells being greater than or equal to 15% (e.g., between 15% and 90%, e.g., between 15% and 80%, e.g., between 15% and 70%, e.g., between 15% and 60%, e.g., between 15% and 50%), performing:
manufacturing a BCMA CAR-expressing cell therapy using cells (e.g., T cells) from the subject and administering the BCMA CAR-expressing cell therapy to the subject; or
administering, e.g., initiating administering or continuing administering, a BCMA CAR-expressing cell therapy to the subject.

36. The method of claim 34 or 35, comprising:
responsive to the percentage of CCR7+CD45RO−CD27+CD8+ cells among CD8+ T cells being less than 15% (e.g., between 0.1% and 15%, e.g., between 0.1% and 12%, e.g., between 0.1% and 10%, e.g., between 0.1% and 8%), performing one, two, three, four, five, six, seven, or all of:
administering an altered dosing regimen of a BCMA CAR-expressing cell therapy (e.g., a dosing regimen with a higher dose and/or more frequent administration than a reference dosing regimen) to the subject;
administering a second therapy (e.g., a second therapy that is not a BCMA CAR-expressing cell therapy) to the subject;
administering a BCMA CAR-expressing cell therapy and a second therapy to the subject;
discontinuing administration of a BCMA CAR-expressing cell therapy and optionally administering a second therapy to the subject;
modifying a manufacturing process of a BCMA CAR-expressing cell therapy, e.g., enriching for CD4+ immune effector cells (e.g., CD4+ T cells) relative to CD8+ immune effector cells (CD8+ T cells) prior to introducing a nucleic acid encoding a BCMA CAR, and administering the BCMA CAR-expressing cell therapy generated by the modified manufacturing process to the subject;
modifying a manufacturing process of a BCMA CAR-expressing cell therapy, e.g., enriching for CD8+ Tscm (e.g., HLADR-CD95+CD27+CD8+ cells, CD45RO−CD27+CD8+ cells, or CCR7+CD45RO−CD27+CD8+ cells) prior to introducing a nucleic acid encoding a BCMA CAR, and administering the BCMA CAR-expressing cell therapy generated by the modified manufacturing process to the subject;
modifying a manufacturing process of the BCMA CAR-expressing cell therapy, e.g., increasing the proliferation of seeded cells from the subject during the manufacturing of the BCMA CAR-expressing cell therapy, and administering the BCMA CAR-expressing cell therapy generated by the modified manufacturing process to the subject; or
administering a pretreatment to the subject, wherein the pretreatment increases the ratio of the amount of CD4+ immune effector cells (e.g., CD4+ T cells) to the amount of CD8+ immune effector cells (e.g., CD8+ T cells) in the subject, e.g., in a sample from the subject (e.g., an apheresis sample (e.g., a leukapheresis sample), in a seed culture at the start of the manufacturing of a BCMA CAR-expressing cell therapy (e.g., a leukapheresis sample after monocytes are removed using elutriation)), or in the subject's peripheral blood and/or bone marrow prior to the administration of the BCMA CAR-expressing cell therapy, e.g., the pretreatment increases the ratio to greater than or equal to 1.6 (e.g., between 1.6 and 5, e.g., between 1.6 and 3.5), manufacturing the BCMA CAR-expressing cell therapy using cells (e.g., T cells) from the subject, and administering the BCMA CAR-expressing cell therapy to the subject.

37. The method of any one of claims 20-36, wherein the value for the proliferation of seeded cells from the subject during manufacturing of the BCMA CAR-expressing cell therapy comprises the fold expansion of seeded cells from the subject during manufacturing (e.g., total cell counts at the end of manufacturing relative to at the start of manufacturing) of the BCMA CAR-expressing cell therapy, e.g., as measured by an assay disclosed herein, e.g., as measured by cell counting.

38. A method of evaluating or predicting the potency of a BCMA CAR-expressing cell therapy in a subject, wherein the subject has a disease associated with the expression of BCMA and wherein the BCMA CAR-expressing cell therapy is manufactured using cells (e.g., T cells) from the subject, comprising:
acquiring a value for one, two, three, four, five, or all of:
(i) the level or activity of CD4+ immune effector cells (e.g., CD4+ T cells) relative to the level or activity of CD8+ immune effector cells (e.g., CD8+ T cells) in the subject, e.g., in a sample from the subject (e.g., an apheresis sample (e.g., a leukapheresis sample), in a seed culture at the start of the manufacturing of the BCMA CAR-expressing cell therapy (e.g., a leukapheresis sample after monocytes are removed using elutriation)), or in the subject's peripheral blood and/or bone marrow prior to the administration of the BCMA CAR-expressing cell therapy,
(ii) the level or activity of CD8+ Tscm (stem cell memory T cells) in the subject, e.g., in a sample from the subject (e.g., an apheresis sample (e.g., a leukapheresis sample) or a seed culture at the start of the manufacturing of the BCMA CAR-expressing cell therapy (e.g., a leukapheresis sample after monocytes are removed using elutriation)),
(iii) the level or activity of HLADR-CD95+CD27+CD8+ cells in the subject, e.g., in a sample from the subject (e.g., an apheresis sample (e.g., a leukapheresis sample) or a seed culture at the start of the manufacturing of the BCMA CAR-expressing cell therapy (e.g., a leukapheresis sample after monocytes are removed using elutriation)),
(iv) the level or activity of CD45RO−CD27+CD8+ cells in the subject, e.g., in a sample from the subject (e.g., an apheresis sample (e.g., a leukapheresis sample) or a seed culture at the start of the manufacturing of the BCMA CAR-expressing cell therapy (e.g., a leukapheresis sample after monocytes are removed using elutriation)),
(v) the level or activity of CCR7+CD45RO−CD27+CD8+ cells in the subject, e.g., in a sample from the subject (e.g., an apheresis sample (e.g., a leukapheresis sample) or a seed culture at the start of the manufacturing of the BCMA CAR-expressing cell therapy (e.g., a leukapheresis sample after monocytes are removed using elutriation)), or
(vi) the proliferation of seeded cells from the subject during manufacturing of the BCMA CAR-expressing cell therapy, e.g., as measured by population doublings by day 9 (PDL9), wherein:
(a) an increase in the value of one, two, three, four, five, or all of (i)-(vi), as compared to a reference value, e.g., a non-responder reference value, is indicative or predictive of increased potency of the BCMA CAR-expressing cell therapy in the subject; or
(b) a decrease in the value of one, two, three, four, five, or all of (i)-(vi), as compared to a reference value, e.g., a responder reference value, is indicative or predictive of decreased potency of the BCMA CAR-expressing cell therapy in the subject,
thereby evaluating or predicting the potency of the BCMA CAR-expressing cell therapy.

39. The method of claim 38, wherein the increase in the value of one, two, three, four, five, or all of (i)-(vi), as compared to a reference value, e.g., a non-responder reference value, is indicative or predictive of increased expansion of the BCMA CAR-expressing cell therapy in the subject, e.g., as measured by an assay disclosed herein, e.g., as measured by the copy number of CAR transgenes per μg DNA using qPCR.

40. The method of claim 38 or 39, wherein the decrease in the value of one, two, three, four, five, or all of (i)-(vi), as compared to a reference value, e.g., a responder reference value, is indicative or predictive of decreased expansion of the BCMA CAR-expressing cell therapy in the subject, e.g., as measured by an assay disclosed herein, e.g., as measured by the copy number of CAR transgenes per μg DNA using qPCR.

41. A method of manufacturing a BCMA CAR-expressing cell therapy, wherein the BCMA CAR-expressing cell therapy is manufactured using cells (e.g., T cells) from a subject, comprising:
acquiring a value for one, two, three, four, five, or all of:
(i) the level or activity of CD4+ immune effector cells (e.g., CD4+ T cells) relative to the level or activity of CD8+ immune effector cells (e.g., CD8+ T cells) in the subject, e.g., in a sample from the subject (e.g., an apheresis sample (e.g., a leukapheresis sample), in a seed culture at the start of the manufacturing of the BCMA CAR-expressing cell therapy (e.g., a leukapheresis sample after monocytes are removed using elutriation)), or in the subject's peripheral blood and/or bone marrow prior to the administration of the BCMA CAR-expressing cell therapy,
(ii) the level or activity of CD8+ Tscm (stem cell memory T cells) in the subject, e.g., in a sample from the subject (e.g., an apheresis sample (e.g., a leukapheresis sample) or a seed culture at the start of the manufacturing of the BCMA CAR-expressing cell therapy (e.g., a leukapheresis sample after monocytes are removed using elutriation)),
(iii) the level or activity of HLADR-CD95+CD27+CD8+ cells in the subject, e.g., in a sample from the subject (e.g., an apheresis sample (e.g., a leukapheresis sample) or a seed culture at the start of the manufacturing of the BCMA CAR-expressing cell therapy (e.g., a leukapheresis sample after monocytes are removed using elutriation)),
(iv) the level or activity of CD45RO−CD27+CD8+ cells in the subject, e.g., in a sample from the subject (e.g., an apheresis sample (e.g., a leukapheresis sample) or a seed culture at the start of the manufacturing of the BCMA CAR-expressing cell therapy (e.g., a leukapheresis sample after monocytes are removed using elutriation)),
(v) the level or activity of CCR7+CD45RO−CD27+CD8+ cells in the subject, e.g., in a sample from the subject (e.g., an apheresis sample (e.g., a leukapheresis sample) or a seed culture at the start of the manufacturing of the BCMA CAR-expressing cell therapy (e.g., a leukapheresis sample after monocytes are removed using elutriation)), or
(vi) the proliferation of seeded cells from the subject during manufacturing of the BCMA CAR-expressing cell therapy, e.g., as measured by population doublings by day 9 (PDL9), wherein:
responsive to an increase in the value of one, two, three, four, five, or all of (i)-(vi), as compared to a reference value, e.g., a non-responder reference value, manufacturing the BCMA CAR-expressing cell therapy using cells from the subject.

42. A method of manufacturing a BCMA CAR-expressing cell therapy, wherein the BCMA CAR-expressing cell therapy is manufactured using cells (e.g., T cells) from a subject, comprising:
acquiring a value for one, two, three, four, five, or all of:
(i) the level or activity of CD4+ immune effector cells (e.g., CD4+ T cells) relative to the level or activity of CD8+ immune effector cells (e.g., CD8+ T cells) in the subject, e.g., in a sample from the subject (e.g., an apheresis sample (e.g., a leukapheresis sample), in a seed culture at the start of the manufacturing of the BCMA CAR-expressing cell therapy (e.g., a leukapheresis sample after monocytes are removed using elutriation)), or in the subject's peripheral blood and/or bone marrow prior to the administration of the BCMA CAR-expressing cell therapy,
(ii) the level or activity of CD8+ Tscm (stem cell memory T cells) in the subject, e.g., in a sample from the subject (e.g., an apheresis sample (e.g., a leukapheresis sample) or a seed culture at the start of the manufacturing of the BCMA CAR-expressing cell therapy (e.g., a leukapheresis sample after monocytes are removed using elutriation)),
(iii) the level or activity of HLADR-CD95+CD27+CD8+ cells in the subject, e.g., in a sample from the subject (e.g., an apheresis sample (e.g., a leukapheresis sample) or a seed culture at the start of the manufacturing of the BCMA CAR-expressing cell therapy (e.g., a leukapheresis sample after monocytes are removed using elutriation)),
(iv) the level or activity of CD45RO−CD27+CD8+ cells in the subject, e.g., in a sample from the subject (e.g., an apheresis sample (e.g., a leukapheresis sample) or a seed culture at the start of the manufacturing of the BCMA CAR-expressing cell therapy (e.g., a leukapheresis sample after monocytes are removed using elutriation)),
(v) the level or activity of CCR7+CD45RO−CD27+CD8+ cells in the subject, e.g., in a sample from the subject (e.g., an apheresis sample (e.g., a leukapheresis sample) or a seed culture at the start of the manufacturing of the BCMA CAR-expressing cell therapy (e.g., a leukapheresis sample after monocytes are removed using elutriation)), or
(vi) the proliferation of seeded cells from the subject during manufacturing of the BCMA CAR-expressing cell therapy, e.g., as measured by population doublings by day 9 (PDL9), wherein:
responsive to a decrease in the value of one, two, three, four, five, or all of (i)-(vi), as compared to a reference value, e.g., a responder reference value, performing one, two, three, or all of:
modifying a manufacturing process of the BCMA CAR-expressing cell therapy, e.g., enriching for CD4+ immune effector cells (e.g., CD4+ T cells) relative to CD8+ immune effector cells (CD8+ T cells) prior to introducing a nucleic acid encoding a BCMA CAR;
modifying a manufacturing process of the BCMA CAR-expressing cell therapy, e.g., enriching for CD8+ Tscm (e.g., HLADR-CD95+CD27+CD8+ cells, CD45RO−CD27+CD8+ cells, or CCR7+CD45RO−CD27+CD8+ cells) prior to introducing a nucleic acid encoding a BCMA CAR;
modifying a manufacturing process of the BCMA CAR-expressing cell therapy, e.g., increasing the proliferation of seeded cells from the subject during the manufacturing of the BCMA CAR-expressing cell therapy; or
administering a pretreatment to the subject, wherein the pretreatment increases the ratio of the amount of CD4+ immune effector cells (e.g., CD4+ T cells) to the amount of CD8+ immune effector cells (e.g., CD8+ T cells) in the subject, e.g., in a sample from the subject (e.g., an apheresis sample (e.g., a leukapheresis sample), in a seed culture at the start of the manufacturing of the BCMA CAR-expressing cell therapy (e.g., a leukapheresis sample after monocytes are removed using elutriation)), or in the subject's peripheral blood and/or bone marrow prior to the administration of the BCMA CAR-expressing cell therapy, e.g., the pretreatment increases the ratio to greater than or equal to 1.6 (e.g., between 1.6 and 5, e.g., between 1.6 and 3.5), and manufacturing the BCMA CAR-expressing cell therapy using cells (e.g., T cells) from the subject.

43. The method of any one of claims 38-42, wherein the value for the level or activity of CD4+ immune effector cells (e.g., CD4+ T cells) relative to the level or activity of CD8+ immune effector cells (e.g., CD8+ T cells) comprises a ratio of the amount of CD4+ immune effector cells (e.g., CD4+ T cells) to the amount of CD8+ immune effector cells (e.g., CD8+ T cells), e.g., as measured by an assay disclosed herein, e.g., flow cytometry.

44. The method of any one of claims 38-43, wherein the value for the level or activity of CD8+ Tscm (stem cell memory T cells) comprises the percentage of CD8+ Tscm (stem cell memory T cells) among CD8+ T cells, e.g., as measured by an assay disclosed herein, e.g., flow cytometry.

45. The method of any one of claims 38-44, wherein the value for the level or activity of HLADR-CD95+CD27+CD8+ cells comprises the percentage of HLADR-CD95+CD27+CD8+ cells among CD8+ T cells, e.g., as measured by an assay disclosed herein, e.g., flow cytometry.

46. The method of any one of claims 38-45, the value for the level or activity of CD45RO−CD27+CD8+ cells comprises the percentage of CD45RO−CD27+CD8+ cells among CD8+ T cells, e.g., as measured by an assay disclosed herein, e.g., flow cytometry.

47. The method of any one of claims 38-46, wherein the value for the level or activity of CCR7+CD45RO−CD27+CD8+ cells comprises the percentage of CCR7+CD45RO−CD27+CD8+ cells among CD8+ T cells, e.g., as measured by an assay disclosed herein, e.g., flow cytometry.

48. The method of any one of claims 38-47, the value for the proliferation of seeded cells from the subject during manufacturing of the BCMA CAR-expressing cell therapy comprises the fold expansion of seeded cells from the subject during manufacturing (e.g., total cell counts at the end of manufacturing relative to at the start of manufacturing) of the BCMA CAR-expressing cell therapy, e.g., as measured by an assay disclosed herein, e.g., as measured by cell counting.

49. The method of any one of claims 1-48, comprising administering the BCMA CAR-expressing cell therapy to the subject in combination with one, two, or all of:
(1) an agent that increases the efficacy of the cell comprising the CAR nucleic acid or CAR polypeptide;
(2) an agent that ameliorates one or more side effects associated with administration of the cell comprising the CAR nucleic acid or CAR polypeptide;
(3) an agent that treats the disease associated with the expression of BCMA.

50. The method of any one of claims 1-49, comprising administering the BCMA CAR-expressing cell therapy to the subject in combination with a compound of Formula (I) (COF1), wherein the COF1 is: [chemical structure]
or a pharmaceutically acceptable salt, ester, hydrate, solvate, or tautomer thereof, wherein:
X is O or S;
R¹ is C₁-C₆ alkyl, C₂-C₆ alkenyl, C₂-C₆ alkynyl, C₁-C₆ heteroalkyl, carbocyclyl, heterocyclyl, aryl, or heteroaryl, each of which is optionally substituted by one or more R⁴;
each of R^{2a} and R^{2b} is independently hydrogen or C₁-C₆ alkyl; or R^{2a} and R^{2b} together with the carbon atom to which they are attached form a carbonyl group or a thiocarbonyl group;
each of R³ is independently C₁-C₆ alkyl, C₂-C₆ alkenyl, C₂-C₆ alkynyl, C₁-C₆ heteroalkyl, halo, cyano, —C(O)R^{A}, —C(O)OR^{B}, —OR^{B}, —N(R^{C})(R^{D}), —C(O)N(R^{C})(R^{D}), —N(R^{C})C(O)R^{A}, —S(O)ₓR^{E}, —S(O)ₓN(R^{C})(R^{D}), or —N(R^{C})S(O)ₓR^{E}, wherein each alkyl, alkenyl, alkynyl, and heteroalkyl is independently and optionally substituted with one or more R⁶;
each R⁴ is independently C₁-C₆ alkyl, C₂-C₆ alkenyl, C₂-C₆ alkynyl, C₁-C₆ heteroalkyl, halo, cyano, oxo, —C(O)R^{A}, —C(O)OR^{B}, —OR^{B}, —N(R^{C})(R^{D}), —C(O)N(R^{C})(R^{D}), —N(R^{C})C(O)R^{A}, —S(O)ₓR^{E}, —S(O)ₓN(R^{C})(R^{D}), —N(R^{C})S(O)ₓR^{E}, carbocyclyl, heterocyclyl, aryl, or heteroaryl, wherein each alkyl, alkenyl, alkynyl, heteroalkyl, carbocyclyl, heterocyclyl, aryl, and heteroaryl is independently and optionally substituted with one or more IV;
each of R^{A}, R^{B}, R^{C}, R^{D}, and R^{E} is independently hydrogen or C₁-C₆ alkyl;
each R⁶ is independently C₁-C₆ alkyl, oxo, cyano, —OR^{B}, —N(R^{C})(R^{D}), —C(O)N(R^{C})(R^{D}), —N(R^{C})C(O)R^{A}, aryl, or heteroaryl, wherein each aryl and heteroaryl is independently and optionally substituted with one or more R⁸;
each R⁷ is independently halo, oxo, cyano, —OR^{B}, —N(R^{C})(R^{D}), —C(O)N(R^{C})(R^{D}), or —N(R^{C})C(O)R^{A};
each R⁸ is independently C₁-C₆ alkyl, cyano, —OR^{B}, —N(R^{C})(R^{D}), —C(O)N(R^{C})(R^{D}), or —N(R^{C})C(O)R^{A};
n is 0, 1, 2, 3 or 4; and
x is 0, 1, or 2, optionally wherein:
(1) the COF1 is an immunomodulatory imide drug (IMiD), or a pharmaceutically acceptable salt thereof;
(2) the COF1 is selected from the group consisting of lenalidomide, pomalidomide, thalidomide, and 2-(4-(tert-butyl)phenyl)-N-((2-(2,6-dioxopiperidin-3-yl)-1-oxoisoindolin-5-yl)methyl)acetamide, or a pharmaceutically acceptable salt thereof;
(3) the COF1 is selected from the group consisting of: [chemical structure]
or a pharmaceutically acceptable salt thereof; or
(4) the COF1 is lenalidomide, or a pharmaceutically acceptable salt thereof.

51. The method of any one of claims 1-50, comprising administering the BCMA CAR-expressing cell therapy to the subject in combination with a kinase inhibitor, e.g., a BTK inhibitor, e.g., ibrutinib.

52. The method of any one of claims 1-51, comprising administering the BCMA CAR-expressing cell therapy to the subject in combination with a second CAR-expressing cell therapy, optionally wherein the second CAR-expressing cell therapy is:
(1) a CD19 CAR-expressing cell therapy, e.g., a CD19 CAR-expressing cell therapy disclosed herein, e.g., CTL119 or CTL019, optionally wherein the CD19 CAR-expressing cell therapy is administered after the administration of the BCMA CAR-expressing cell therapy, e.g., after CD19 expression is increased in the subject following the administration of the BCMA CAR-expressing cell therapy;
(2) a CD20 CAR-expressing cell therapy, e.g., a CD20 CAR-expressing cell therapy disclosed herein, optionally wherein the CD20 CAR-expressing cell therapy is administered after the administration of the BCMA CAR-expressing cell therapy, e.g., after CD20 expression is increased in the subject following the administration of the BCMA CAR-expressing cell therapy;
(3) a CD22 CAR-expressing cell therapy, e.g., a CD22 CAR-expressing cell therapy disclosed herein, optionally wherein the CD22 CAR-expressing cell therapy is administered after the administration of the BCMA CAR-expressing cell therapy, e.g., after CD22 expression is increased in the subject following the administration of the BCMA CAR-expressing cell therapy;
(4) a CAR-expressing cell therapy comprising a cell expressing a first CAR and a second CAR, wherein the first CAR is a BCMA CAR (e.g., a BCMA CAR disclosed herein), optionally wherein the second CAR is selected from the group consisting of a CD19 CAR (e.g., a CD19 CAR disclosed herein), a CD20 CAR (e.g., a CD20 CAR disclosed herein), and a CD22 CAR (e.g., a CD22 CAR disclosed herein); or
(5) a CAR-expressing cell therapy comprising a cell expressing a multispecific CAR, e.g., a bispecific CAR, that binds to a first antigen and a second antigen, wherein the first antigen is BCMA, optionally wherein the second antigen is selected from the group consisting of CD19, CD20, and CD22.

53. The method of any one of claims 1-52, comprising administering the BCMA CAR-expressing cell therapy to the subject in combination with a CD19 inhibitor, e.g., a CD19 inhibitor disclosed herein, optionally wherein the CD19 inhibitor is administered after the administration of the BCMA CAR-expressing cell therapy, e.g., after CD19 expression is increased in the subject following the administration of the BCMA CAR-expressing cell therapy.

54. The method of any one of claims 1-53, comprising administering the BCMA CAR-expressing cell therapy to the subject in combination with a CD20 inhibitor, e.g., a CD20 inhibitor disclosed herein, optionally wherein the CD20 inhibitor is a multispecific antibody molecule, e.g., a bispecific antibody molecule, that binds to CD20 and CD3, e.g., THG338, optionally wherein the CD20 inhibitor is administered after the administration of the BCMA CAR-expressing cell therapy, e.g., after CD20 expression is increased in the subject following the administration of the BCMA CAR-expressing cell therapy.

55. The method of any one of claims 1-54, comprising administering the BCMA CAR-expressing cell therapy to the subject in combination with a CD22 inhibitor, e.g., a CD22 inhibitor disclosed herein, optionally wherein the CD22 inhibitor is administered after the administration of the BCMA CAR-expressing cell therapy, e.g., after CD22 expression is increased in the subject following the administration of the BCMA CAR-expressing cell therapy.

56. The method of any one of claims 1-55, comprising administering the BCMA CAR-expressing cell therapy to the subject in combination with a molecule that binds to Fc receptor like 2 (FCRL2) or Fc receptor like 5 (FCRL5), optionally wherein the molecule is:
(1) a CAR-expressing cell therapy comprising a cell expressing a CAR that binds to FCRL2 or FCRL5; or
(2) a multispecific antibody molecule, e.g., a bispecific antibody molecule, that binds to a first antigen and a second antigen, wherein the first antigen is FCRL2 or FCRL5, optionally wherein the second antigen is CD3.

57. The method of any one of claims 1-56, comprising administering the BCMA CAR-expressing cell therapy to the subject in combination with an interleukin-15 (IL-15) polypeptide, an interleukin-15 receptor alpha (IL-15Ra) polypeptide, or a combination of both an IL-15 polypeptide and an IL-15Ra polypeptide, e.g., hetIL-15.

58. The method of any one of claims 1-57, comprising administering the BCMA CAR-expressing cell therapy to the subject in combination with an inhibitor of TGF beta.

59. The method of any one of claims 1-58, comprising administering the BCMA CAR-expressing cell therapy to the subject in combination with an EGFR^{mut}-tyrosine kinase inhibitor (TKI), e.g., EGF816.

60. The method of any one of claims 1-59, comprising administering the BCMA CAR-expressing cell therapy to the subject in combination with an adenosine A2AR antagonist, optionally wherein:
(1) the adenosine A2AR antagonist is selected from the group consisting of PBF509, CPI444, AZD4635, Vipadenant, GBV-2034, and AB928; or
(2) the adenosine A2AR antagonist is selected from the group consisting of 5-bromo-2,6-di-(1H-pyrazol-1-yl)pyrimidine-4-amine; (S)-7-(5-methylfuran-2-yl)-3-((6-(((tetrahydrofuran-3-yl)oxy)methyl)pyridin-2-yl)methyl)-3H-[1,2,3]triazolo[4,5-d]pyrimidin-5-amine; (R)-7-(5-methylfuran-2-yl)-3-((6-(((tetrahydrofuran-3-yl)oxy)methyl)pyridin-2-yl)methyl)-3H-[1,2,3]triazolo[4,5-c]pyrimidin-5-amine, or racemate thereof; 7-(5-methylfuran-2-yl)-3-((6-(((tetrahydrofuran-3-yl)oxy)methyl)pyridin-2-yl)methyl)-3H-[1,2,3]triazolo[4,5-d]pyrimidin-5-amine; and 6-(2-chloro-6-methylpyridin-4-yl)-5-(4-fluorophenyl)-1,2,4-triazin-3-amine.

61. The method of any one of claims 1-60, comprising administering the BCMA CAR-expressing cell therapy to the subject in combination with an anti-CD73 antibody molecule, e.g., an anti-CD73 antibody molecule disclosed herein.

62. The method of any one of claims 1-61, comprising administering the BCMA CAR-expressing cell therapy to the subject in combination with a check point inhibitor, optionally wherein the check point inhibitor is:
(1) a PD-1 inhibitor, optionally wherein the PD-1 inhibitor is selected from the group consisting of PDR001, Nivolumab, Pembrolizumab, Pidilizumab, MEDI0680, REGN2810, TSR-042, PF-06801591, and AMP-224, optionally wherein the PD-1 inhibitor increases expansion of BCMA CAR-expressing cells in the subject;
(2) a PD-L1 inhibitor, optionally wherein the PD-L1 inhibitor is selected from the group consisting of FAZ053, Atezolizumab, Avelumab, Durvalumab, and BMS-936559, optionally wherein the PD-L1 inhibitor increases expansion of BCMA CAR-expressing cells in the subject;
(3) a LAG-3 inhibitor, optionally wherein the LAG-3 inhibitor is selected from the group consisting of LAG525, BMS-986016, TSR-033, MK-4280 and REGN3767; or
(4) a TIM-3 inhibitor, optionally wherein the TIM-3 inhibitor is selected from the group consisting of MGB453, TSR-022, and LY3321367.

63. The method of any one of claims 1-62, comprising administering the BCMA CAR-expressing cell therapy to the subject in combination with an antibody molecule that binds to CD32B.

64. The method of any one of claims 1-63, comprising administering the BCMA CAR-expressing cell therapy to the subject in combination with an antibody molecule that binds to IL-17, e.g., an antagonistic antibody molecule that binds to IL-17, e.g., CJM112.

65. The method of any one of claims 1-64, comprising administering the BCMA CAR-expressing cell therapy to the subject in combination with an antibody molecule that binds to IL-1 beta.

66. The method of any one of claims 1-65, comprising administering the BCMA CAR-expressing cell therapy to the subject in combination with an inhibitor of indoleamine 2,3-dioxygenase (IDO) and/or tryptophan 2,3-dioxygenase (TDO), e.g., an IDO1 inhibitor, optionally wherein the inhibitor of IDO and/or TDO is chosen from:
(1) INCB24360, indoximod, NLG919, epacadostat, NLG919, or F001287; or
(2) (4E)-4-[(3-chloro-4-fluoroanilino)-nitrosomethylidene]-1,2,5-oxadiazol-3-amine, 1-methyl-D-tryptophan, α-cyclohexyl-5H-Imidazo[5,1-a]isoindole-5-ethanol, or the D isomer of 1-methyl-tryptophan.

67. A method of treating a subject having a disease associated with the expression of BCMA, comprising administering a BCMA CAR-expressing cell therapy and a second therapy to the subject, wherein the second therapy is:
(1) a CD19 CAR-expressing cell therapy, e.g., a CD19 CAR-expressing cell therapy disclosed herein, e.g., CTL119 or CTL019, optionally wherein the CD19 CAR-expressing cell therapy is administered after the administration of the BCMA CAR-expressing cell therapy, e.g., after CD19 expression is increased in the subject following the administration of the BCMA CAR-expressing cell therapy;
(2) a CD20 CAR-expressing cell therapy, e.g., a CD20 CAR-expressing cell therapy disclosed herein, optionally wherein the CD20 CAR-expressing cell therapy is administered after the administration of the BCMA CAR-expressing cell therapy, e.g., after CD20 expression is increased in the subject following the administration of the BCMA CAR-expressing cell therapy;
(3) a CD22 CAR-expressing cell therapy, e.g., a CD22 CAR-expressing cell therapy disclosed herein, optionally wherein the CD22 CAR-expressing cell therapy is administered after the administration of the BCMA CAR-expressing cell therapy, e.g., after CD22 expression is increased in the subject following the administration of the BCMA CAR-expressing cell therapy;
(4) a CAR-expressing cell therapy comprising a cell expressing a first CAR and a second CAR, wherein the first CAR is a BCMA CAR (e.g., a BCMA CAR disclosed herein), optionally wherein the second CAR is selected from the group consisting of a CD19 CAR (e.g., a CD19 CAR disclosed herein), a CD20 CAR (e.g., a CD20 CAR disclosed herein), and a CD22 CAR (e.g., a CD22 CAR disclosed herein); or
(5) a CAR-expressing cell therapy comprising a cell expressing a multispecific CAR, e.g., a bispecific CAR that binds to a first antigen and a second antigen, wherein the first antigen is BCMA, optionally wherein the second antigen is selected from the group consisting of CD19, CD20, and CD22.

68. A method of treating a subject having a disease associated with the expression of BCMA, comprising administering a BCMA CAR-expressing cell therapy and a second therapy to the subject, wherein the second therapy is:
(1) a CD19 inhibitor, e.g., a CD19 inhibitor disclosed herein, optionally wherein the CD19 inhibitor is administered after the administration of the BCMA CAR-expressing cell therapy, e.g., after CD19 expression is increased in the subject following the administration of the BCMA CAR-expressing cell therapy;
(2) a CD20 inhibitor, e.g., a CD20 inhibitor disclosed herein, optionally wherein the CD20 inhibitor is a multispecific antibody molecule, e.g., a bispecific antibody molecule that binds to CD20 and CD3, e.g., THG338, optionally wherein the CD20 inhibitor is administered after the administration of the BCMA CAR-expressing cell therapy, e.g., after CD20 expression is increased in the subject following the administration of the BCMA CAR-expressing cell therapy; or
(3) a CD22 inhibitor, e.g., a CD22 inhibitor disclosed herein, optionally wherein the CD22 inhibitor is administered after the administration of the BCMA CAR-expressing cell therapy, e.g., after CD22 expression is increased in the subject following the administration of the BCMA CAR-expressing cell therapy.

69. A method of treating a subject having a disease associated with the expression of BCMA, comprising administering a BCMA CAR-expressing cell therapy and a second therapy to the subject, wherein the second therapy is a molecule that binds to Fc receptor like 2 (FCRL2) or Fc receptor like 5 (FCRL5), optionally wherein the molecule is:
(1) a CAR-expressing cell therapy comprising a cell expressing a CAR that binds to FCRL2 or FCRL5; or
(2) a multispecific antibody molecule, e.g., a bispecific antibody molecule, that binds to a first antigen and a second antigen, wherein the first antigen is FCRL2 or FCRL5, optionally wherein the second antigen is CD3.

70. A method of treating a subject having a disease associated with the expression of BCMA, comprising administering a BCMA CAR-expressing cell therapy and a second therapy to the subject, wherein the second therapy is an inhibitor of TGF beta.

71. A method of treating a subject having a disease associated with the expression of BCMA, comprising administering a BCMA CAR-expressing cell therapy and a second therapy to the subject, wherein the second therapy is an EGFR′-tyrosine kinase inhibitor (TKI), e.g., EGF816.

72. A method of treating a subject having a disease associated with the expression of BCMA, comprising administering a BCMA CAR-expressing cell therapy and a second therapy to the subject, wherein the second therapy is an adenosine A2AR antagonist, optionally wherein:
(1) the adenosine A2AR antagonist is selected from the group consisting of PBF509, CPI444, AZD4635, Vipadenant, GBV-2034, and AB928; or
(2) the adenosine A2AR antagonist is selected from the group consisting of 5-bromo-2,6-di-(1H-pyrazol-1-yl)pyrimidine-4-amine; (S)-7-(5-methylfuran-2-yl)-3-((6-(((tetrahydrofuran-3-yl)oxy)methyl)pyridin-2-yl)methyl)-3H-[1,2,3]triazolo[4,5-d]pyrimidin-5-amine; (R)-7-(5-methylfuran-2-yl)-3-((6-(((tetrahydrofuran-3-yl)oxy)methyl)pyridin-2-yl)methyl)-3H-[1,2,3]triazolo[4,5-c]pyrimidin-5-amine, or racemate thereof; 7-(5-methylfuran-2-yl)-3-((6-(((tetrahydrofuran-3-yl)oxy)methyl)pyridin-2-yl)methyl)-3H-[1,2,3]triazolo[4,5-d]pyrimidin-5-amine; and 6-(2-chloro-6-methylpyridin-4-yl)-5-(4-fluorophenyl)-1,2,4-triazin-3-amine.

73. A method of treating a subject having a disease associated with the expression of BCMA, comprising administering a BCMA CAR-expressing cell therapy and a second therapy to the subject, wherein the second therapy is an anti-CD73 antibody molecule, e.g., an anti-CD73 antibody molecule disclosed herein.

74. A method of treating a subject having a disease associated with the expression of BCMA, comprising administering a BCMA CAR-expressing cell therapy and a second therapy to the subject, wherein the second therapy is a check point inhibitor, optionally wherein the check point inhibitor is:
(1) a PD-1 inhibitor, optionally wherein the PD-1 inhibitor is selected from the group consisting of PDR001, Nivolumab, Pembrolizumab, Pidilizumab, MEDI0680, REGN2810, TSR-042, PF-06801591, and AMP-224, optionally wherein the PD-1 inhibitor is administered after the administration of the BCMA CAR-expressing cell therapy, e.g., after the expression of PD-1 or PD-L1 is increased in the subject following the administration of the BCMA CAR-expressing cell therapy, optionally wherein the PD-1 inhibitor increases expansion of BCMA CAR-expressing cells in the subject;
(2) a PD-L1 inhibitor, optionally wherein the PD-L1 inhibitor is selected from the group consisting of FAZ053, Atezolizumab, Avelumab, Durvalumab, and BMS-936559, optionally wherein the PD-L1 inhibitor is administered after the administration of the BCMA CAR-expressing cell therapy, e.g., after the expression of PD-1 or PD-L1 is increased in the subject following the administration of the BCMA CAR-expressing cell therapy, optionally wherein the PD-L1 inhibitor increases expansion of BCMA CAR-expressing cells in the subject;
(3) a LAG-3 inhibitor, optionally wherein the LAG-3 inhibitor is selected from the group consisting of LAG525, BMS-986016, TSR-033, MK-4280 and REGN3767, optionally wherein the LAG-3 inhibitor is administered after the administration of the BCMA CAR-expressing cell therapy, e.g., after the expression of LAG-3 is increased in the subject following the administration of the BCMA CAR-expressing cell therapy; or
(4) a TIM-3 inhibitor, optionally wherein the TIM-3 inhibitor is selected from the group consisting of MGB453, TSR-022, and LY3321367, optionally wherein the TIM-3 inhibitor is administered after the administration of the BCMA CAR-expressing cell therapy, e.g., after the expression of TIM-3 is increased in the subject following the administration of the BCMA CAR-expressing cell therapy.

75. A method of treating a subject having a disease associated with the expression of BCMA, comprising administering a BCMA CAR-expressing cell therapy and a second therapy to the subject, wherein the second therapy is an antibody molecule that binds to CD32B.

76. A method of treating a subject having a disease associated with the expression of BCMA, comprising administering a BCMA CAR-expressing cell therapy and a second therapy to the subject, wherein the second therapy is an antibody molecule that binds to IL-17, e.g., an antagonistic antibody molecule that binds to IL-17, e.g., CJM112.

77. A method of treating a subject having a disease associated with the expression of BCMA, comprising administering a BCMA CAR-expressing cell therapy and a second therapy to the subject, wherein the second therapy is an antibody molecule that binds to IL-1 beta.

78. A method of treating a subject having a disease associated with the expression of BCMA, comprising administering a BCMA CAR-expressing cell therapy and a second therapy to the subject, wherein the second therapy is an inhibitor of indoleamine 2,3-dioxygenase (IDO) and/or tryptophan 2,3-dioxygenase (TDO), e.g., an IDO1 inhibitor, optionally wherein the inhibitor of IDO and/or TDO is chosen from:
(1) INCB24360, indoximod, NLG919, epacadostat, NLG919, or F001287; or
(2) (4E)-4-[(3-chloro-4-fluoroanilino)-nitrosomethylidene]-1,2,5-oxadiazol-3-amine, 1-methyl-D-tryptophan, α-cyclohexyl-5H-Imidazo[5,1-a]isoindole-5-ethanol, or the D isomer of 1-methyl-tryptophan, optionally wherein:
the inhibitor of IDO and/or TDO is administered after the administration of the BCMA CAR-expressing cell therapy, e.g., after IDO and/or TDO expression is increased in the subject following the administration of the BCMA CAR-expressing cell therapy.

79. The method of any one of claims 67-78, wherein the second therapy is administered prior to, concurrently with, or subsequent to the administration of the BCMA CAR-expressing cell therapy.

80. A method of treating a subject having a disease associated with the expression of BCMA, wherein the subject has received or is receiving a BCMA CAR-expressing cell therapy, comprising:
responsive to an increase in a value of the level or activity of an antigen in the subject, e.g., in a sample from the subject (e.g., a biopsy sample, e.g., a bone marrow biopsy sample), at at least one time point after the subject began receiving the BCMA CAR-expressing cell therapy, relative to a reference value, wherein the reference value is:
(i) the level or activity of the antigen in the subject, e.g., in a sample from the subject (e.g., a biopsy sample, e.g., a bone marrow biopsy sample), prior to the at least one time point (e.g., the level or activity of the antigen in the subject before the subject began receiving the BCMA CAR-expressing cell therapy, or the level or activity of the antigen in the subject after the subject began receiving the BCMA CAR-expressing cell therapy but prior to the at least one time point);
(ii) the level or activity of the antigen in a different subject having the disease associated with the expression of BCMA; or
(iii) an average level or activity of the antigen in a population of subjects having the disease associated with the expression of BCMA,
administering an inhibitor of the antigen to the subject, wherein:
(1) the antigen is CD19 and the inhibitor of the antigen is a CD19 inhibitor, optionally wherein the CD19 inhibitor is:
(a) a CD19 CAR-expressing cell therapy, e.g., a CD19 CAR-expressing cell therapy disclosed herein, e.g., CTL119 or CTL019;
(b) a CAR-expressing cell therapy comprising a cell expressing a first CAR and a second CAR, wherein the first CAR is a BCMA CAR (e.g., a BCMA CAR disclosed herein) and the second CAR is a CD19 CAR (e.g., a CD19 CAR disclosed herein); or
(c) a CAR-expressing cell therapy comprising a cell expressing a multispecific CAR, e.g., a bispecific CAR, that binds to BCMA and CD19,
(2) the antigen is CD20 and the inhibitor of the antigen is a CD20 inhibitor, optionally wherein the CD20 inhibitor is:
(d) a CD20 CAR-expressing cell therapy, e.g., a CD20 CAR-expressing cell therapy disclosed herein;
(e) a CAR-expressing cell therapy comprising a cell expressing a first CAR and a second CAR, wherein the first CAR is a BCMA CAR (e.g., a BCMA CAR disclosed herein) and the second CAR is a CD20 CAR (e.g., a CD20 CAR disclosed herein);
(f) a CAR-expressing cell therapy comprising a cell expressing a multispecific CAR, e.g., a bispecific CAR, that binds to BCMA and CD20; or
(g) a multispecific antibody molecule, e.g., a bispecific antibody molecule, that binds to CD20 and CD3, e.g., THG338,
(3) the antigen is CD22 and the inhibitor of the antigen is a CD22 inhibitor, optionally wherein the CD22 inhibitor is:
(h) a CD22 CAR-expressing cell therapy, e.g., a CD22 CAR-expressing cell therapy disclosed herein;
(i) a CAR-expressing cell therapy comprising a cell expressing a first CAR and a second CAR, wherein the first CAR is a BCMA CAR (e.g., a BCMA CAR disclosed herein) and the second CAR is a CD22 CAR (e.g., a CD22 CAR disclosed herein); or
(j) a CAR-expressing cell therapy comprising a cell expressing a multispecific CAR, e.g., a bispecific CAR, that binds to BCMA and CD22,
(4) the antigen is PD1 or PD-L1 and the inhibitor of the antigen is an anti-PD1 antibody molecule or an anti-PD-L1 antibody molecule, optionally wherein the inhibitor of the antigen is:
(k) PDR001, Nivolumab, Pembrolizumab, Pidilizumab, MEDI0680, REGN2810, TSR-042, PF-06801591, or AMP-224; or
(l) FAZ053, Atezolizumab, Avelumab, Durvalumab, or BMS-936559,
(5) the antigen is IDO or TDO and the inhibitor of the antigen is an inhibitor of IDO and/or TDO, optionally wherein the inhibitor of IDO and/or TDO is:
(m) INCB24360, indoximod, NLG919, epacadostat, NLG919, or F001287; or
(n) (4E)-4-[(3-chloro-4-fluoroanilino)-nitrosomethylidene]-1,2,5-oxadiazol-3-amine, 1-methyl-D-tryptophan, α-cyclohexyl-5H-Imidazo[5,1-a]isoindole-5-ethanol, or the D isomer of 1-methyl-tryptophan, or
(6) the antigen is TGF-beta and the inhibitor of the antigen is a TGF beta inhibitor.

81. A method of treating a subject having a disease associated with the expression of BCMA, wherein the subject has received or is receiving a BCMA CAR-expressing cell therapy, comprising:
acquiring a value of the level or activity of an antigen in the subject, e.g., in a sample from the subject (e.g., a biopsy sample, e.g., a bone marrow biopsy sample), at at least one time point after the subject began receiving the BCMA CAR-expressing cell therapy,
responsive to an increase in the value relative to a reference value, wherein the reference value is:
(i) the level or activity of the antigen in the subject, e.g., in a sample from the subject (e.g., a biopsy sample, e.g., a bone marrow biopsy sample), prior to the at least one time point (e.g., the level or activity of the antigen in the subject before the subject began receiving the BCMA CAR-expressing cell therapy, or the level or activity of the antigen in the subject after the subject began receiving the BCMA CAR-expressing cell therapy but prior to the at least one time point);
(ii) the level or activity of the antigen in a different subject having the disease associated with the expression of BCMA; or
(iii) an average level or activity of the antigen in a population of subjects having the disease associated with the expression of BCMA,
administering an inhibitor of the antigen to the subject, wherein:
(1) the antigen is CD19 and the inhibitor of the antigen is a CD19 inhibitor, optionally wherein the CD19 inhibitor is:
(a) a CD19 CAR-expressing cell therapy, e.g., a CD19 CAR-expressing cell therapy disclosed herein, e.g., CTL119 or CTL019;
(b) a CAR-expressing cell therapy comprising a cell expressing a first CAR and a second CAR, wherein the first CAR is a BCMA CAR (e.g., a BCMA CAR disclosed herein) and the second CAR is a CD19 CAR (e.g., a CD19 CAR disclosed herein); or
(c) a CAR-expressing cell therapy comprising a cell expressing a multispecific CAR, e.g., a bispecific CAR, that binds to BCMA and CD19,
(2) the antigen is CD20 and the inhibitor of the antigen is a CD20 inhibitor, optionally wherein the CD20 inhibitor is:
(d) a CD20 CAR-expressing cell therapy, e.g., a CD20 CAR-expressing cell therapy disclosed herein;
(e) a CAR-expressing cell therapy comprising a cell expressing a first CAR and a second CAR, wherein the first CAR is a BCMA CAR (e.g., a BCMA CAR disclosed herein) and the second CAR is a CD20 CAR (e.g., a CD20 CAR disclosed herein);
(f) a CAR-expressing cell therapy comprising a cell expressing a multispecific CAR, e.g., a bispecific CAR, that binds to BCMA and CD20; or
(g) a multispecific antibody molecule, e.g., a bispecific antibody molecule, that binds to CD20 and CD3, e.g., THG338,
(3) the antigen is CD22 and the inhibitor of the antigen is a CD22 inhibitor, optionally wherein the CD22 inhibitor is:
(h) a CD22 CAR-expressing cell therapy, e.g., a CD22 CAR-expressing cell therapy disclosed herein;
(i) a CAR-expressing cell therapy comprising a cell expressing a first CAR and a second CAR, wherein the first CAR is a BCMA CAR (e.g., a BCMA CAR disclosed herein) and the second CAR is a CD22 CAR (e.g., a CD22 CAR disclosed herein); or
(j) a CAR-expressing cell therapy comprising a cell expressing a multispecific CAR, e.g., a bispecific CAR, that binds to BCMA and CD22,
(4) the antigen is PD1 or PD-L1 and the inhibitor of the antigen is an anti-PD1 antibody molecule or an anti-PD-L1 antibody molecule, optionally wherein the inhibitor of the antigen is:
(k) PDR001, Nivolumab, Pembrolizumab, Pidilizumab, MEDI0680, REGN2810, TSR-042, PF-06801591, or AMP-224; or
(l) FAZ053, Atezolizumab, Avelumab, Durvalumab, or BMS-936559,
(5) the antigen is IDO or TDO and the inhibitor of the antigen is an inhibitor of IDO and/or TDO, optionally wherein the inhibitor of IDO and/or TDO is:
(m) INCB24360, indoximod, NLG919, epacadostat, NLG919, or F001287; or
(n) (4E)-4-[(3-chloro-4-fluoroanilino)-nitrosomethylidene]-1,2,5-oxadiazol-3-amine, 1-methyl-D-tryptophan, α-cyclohexyl-5H-Imidazo[5,1-a]isoindole-5-ethanol, or the D isomer of 1-methyl-tryptophan, or
(6) the antigen is TGF-beta and the inhibitor of the antigen is a TGF beta inhibitor.

82. A method of treating a subject having a disease associated with the expression of BCMA, comprising:
administering a BCMA CAR-expressing cell therapy to the subject,
responsive to an increase in a value of the level or activity of an antigen in the subject, e.g., in a sample from the subject (e.g., a biopsy sample, e.g., a bone marrow biopsy sample), at at least one time point after the subject began receiving the BCMA CAR-expressing cell therapy, relative to a reference value, wherein the reference value is:
(i) the level or activity of the antigen in the subject, e.g., in a sample from the subject (e.g., a biopsy sample, e.g., a bone marrow biopsy sample), prior to the at least one time point (e.g., the level or activity of the antigen in the subject before the subject began receiving the BCMA CAR-expressing cell therapy, or the level or activity of the antigen in the subject after the subject began receiving the BCMA CAR-expressing cell therapy but prior to the at least one time point);
(ii) the level or activity of the antigen in a different subject having the disease associated with the expression of BCMA; or
(iii) an average level or activity of the antigen in a population of subjects having the disease associated with the expression of BCMA,
administering an inhibitor of the antigen to the subject, wherein:
(1) the antigen is CD19 and the inhibitor of the antigen is a CD19 inhibitor, optionally wherein the CD19 inhibitor is:
(a) a CD19 CAR-expressing cell therapy, e.g., a CD19 CAR-expressing cell therapy disclosed herein, e.g., CTL119 or CTL019;
(b) a CAR-expressing cell therapy comprising a cell expressing a first CAR and a second CAR, wherein the first CAR is a BCMA CAR (e.g., a BCMA CAR disclosed herein) and the second CAR is a CD19 CAR (e.g., a CD19 CAR disclosed herein); or
(c) a CAR-expressing cell therapy comprising a cell expressing a multispecific CAR, e.g., a bispecific CAR, that binds to BCMA and CD19,
(2) the antigen is CD20 and the inhibitor of the antigen is a CD20 inhibitor, optionally wherein the CD20 inhibitor is:
(d) a CD20 CAR-expressing cell therapy, e.g., a CD20 CAR-expressing cell therapy disclosed herein;
(e) a CAR-expressing cell therapy comprising a cell expressing a first CAR and a second CAR, wherein the first CAR is a BCMA CAR (e.g., a BCMA CAR disclosed herein) and the second CAR is a CD20 CAR (e.g., a CD20 CAR disclosed herein);
(f) a CAR-expressing cell therapy comprising a cell expressing a multispecific CAR, e.g., a bispecific CAR, that binds to BCMA and CD20; or
(g) a multispecific antibody molecule, e.g., a bispecific antibody molecule, that binds to CD20 and CD3, e.g., THG338,
(3) the antigen is CD22 and the inhibitor of the antigen is a CD22 inhibitor, optionally wherein the CD22 inhibitor is:
(h) a CD22 CAR-expressing cell therapy, e.g., a CD22 CAR-expressing cell therapy disclosed herein;
(i) a CAR-expressing cell therapy comprising a cell expressing a first CAR and a second CAR, wherein the first CAR is a BCMA CAR (e.g., a BCMA CAR disclosed herein) and the second CAR is a CD22 CAR (e.g., a CD22 CAR disclosed herein); or
(j) a CAR-expressing cell therapy comprising a cell expressing a multispecific CAR, e.g., a bispecific CAR, that binds to BCMA and CD22,
(4) the antigen is PD1 or PD-L1 and the inhibitor of the antigen is an anti-PD1 antibody molecule or an anti-PD-L1 antibody molecule, optionally wherein the inhibitor of the antigen is:
(k) PDR001, Nivolumab, Pembrolizumab, Pidilizumab, MEDI0680, REGN2810, TSR-042, PF-06801591, or AMP-224; or
(l) FAZ053, Atezolizumab, Avelumab, Durvalumab, or BMS-936559,
(5) the antigen is IDO or TDO and the inhibitor of the antigen is an inhibitor of IDO and/or TDO, optionally wherein the inhibitor of IDO and/or TDO is:
(m) INCB24360, indoximod, NLG919, epacadostat, NLG919, or F001287; or
(n) (4E)-4-[(3-chloro-4-fluoroanilino)-nitrosomethylidene]-1,2,5-oxadiazol-3-amine, 1-methyl-D-tryptophan, α-cyclohexyl-5H-Imidazo[5,1-a]isoindole-5-ethanol, or the D isomer of 1-methyl-tryptophan, or
(6) the antigen is TGF-beta and the inhibitor of the antigen is a TGF beta inhibitor.

83. A method of treating a subject having a disease associated with the expression of BCMA, comprising:
administering a BCMA CAR-expressing cell therapy to the subject,
acquiring a value of the level or activity of an antigen in the subject, e.g., in a sample from the subject (e.g., a biopsy sample, e.g., a bone marrow biopsy sample), at at least one time point after the subject began receiving the BCMA CAR-expressing cell therapy,
responsive to an increase in the value relative to a reference value, wherein the reference value is:
(i) the level or activity of the antigen in the subject, e.g., in a sample from the subject (e.g., a biopsy sample, e.g., a bone marrow biopsy sample), prior to the at least one time point (e.g., the level or activity of the antigen in the subject before the subject began receiving the BCMA CAR-expressing cell therapy, or the level or activity of the antigen in the subject after the subject began receiving the BCMA CAR-expressing cell therapy but prior to the at least one time point);
(ii) the level or activity of the antigen in a different subject having the disease associated with the expression of BCMA; or
(iii) an average level or activity of the antigen in a population of subjects having the disease associated with the expression of BCMA,
administering an inhibitor of the antigen to the subject, wherein:
(1) the antigen is CD19 and the inhibitor of the antigen is a CD19 inhibitor, optionally wherein the CD19 inhibitor is:
(a) a CD19 CAR-expressing cell therapy, e.g., a CD19 CAR-expressing cell therapy disclosed herein, e.g., CTL119 or CTL019;
(b) a CAR-expressing cell therapy comprising a cell expressing a first CAR and a second CAR, wherein the first CAR is a BCMA CAR (e.g., a BCMA CAR disclosed herein) and the second CAR is a CD19 CAR (e.g., a CD19 CAR disclosed herein); or
(c) a CAR-expressing cell therapy comprising a cell expressing a multispecific CAR, e.g., a bispecific CAR, that binds to BCMA and CD19,
(2) the antigen is CD20 and the inhibitor of the antigen is a CD20 inhibitor, optionally wherein the CD20 inhibitor is:
(d) a CD20 CAR-expressing cell therapy, e.g., a CD20 CAR-expressing cell therapy disclosed herein;
(e) a CAR-expressing cell therapy comprising a cell expressing a first CAR and a second CAR, wherein the first CAR is a BCMA CAR (e.g., a BCMA CAR disclosed herein) and the second CAR is a CD20 CAR (e.g., a CD20 CAR disclosed herein);
(f) a CAR-expressing cell therapy comprising a cell expressing a multispecific CAR, e.g., a bispecific CAR, that binds to BCMA and CD20; or
(g) a multispecific antibody molecule, e.g., a bispecific antibody molecule, that binds to CD20 and CD3, e.g., THG338,
(3) the antigen is CD22 and the inhibitor of the antigen is a CD22 inhibitor, optionally wherein the CD22 inhibitor is:
(h) a CD22 CAR-expressing cell therapy, e.g., a CD22 CAR-expressing cell therapy disclosed herein;
(i) a CAR-expressing cell therapy comprising a cell expressing a first CAR and a second CAR, wherein the first CAR is a BCMA CAR (e.g., a BCMA CAR disclosed herein) and the second CAR is a CD22 CAR (e.g., a CD22 CAR disclosed herein); or
(j) a CAR-expressing cell therapy comprising a cell expressing a multispecific CAR, e.g., a bispecific CAR, that binds to BCMA and CD22,
(4) the antigen is PD1 or PD-L1 and the inhibitor of the antigen is an anti-PD1 antibody molecule or an anti-PD-L1 antibody molecule, optionally wherein the inhibitor of the antigen is:
(k) PDR001, Nivolumab, Pembrolizumab, Pidilizumab, MEDI0680, REGN2810, TSR-042, PF-06801591, or AMP-224; or
(l) FAZ053, Atezolizumab, Avelumab, Durvalumab, or BMS-936559,
(5) the antigen is IDO or TDO and the inhibitor of the antigen is an inhibitor of IDO and/or TDO, optionally wherein the inhibitor of IDO and/or TDO is:
(m) INCB24360, indoximod, NLG919, epacadostat, NLG919, or F001287; or
(n) (4E)-4-[(3-chloro-4-fluoroanilino)-nitrosomethylidene]-1,2,5-oxadiazol-3-amine, methyl-D-tryptophan, α-cyclohexyl-5H-Imidazo[5,1-a]isoindole-5-ethanol, or the D isomer of 1-methyl-tryptophan, or
(6) the antigen is TGF-beta and the inhibitor of the antigen is a TGF beta inhibitor.

84. The method of any one of claims 80-83, wherein the value of the level or activity of the antigen comprises the expression level of the antigen in the subject, e.g., in a sample from the subject (e.g., a biopsy sample, e.g., a bone marrow biopsy sample), as measured by an assay described herein, e.g., immunohistochemistry.

85. The method of any one of claims 80-84, wherein the at least one time point is 5, 10, 15, 20, 25, 28, 30, 35, 40, 45, 50, 55, 60, 65, 70, 75, 80, or 90 days after the subject began receiving the BCMA CAR-expressing cell therapy.

86. The method of any one of claims 80-85, wherein the subject experiences a decrease in BCMA expression after the subject began receiving the BCMA CAR-expressing cell therapy.

87. The method of any one of claims 1-86, wherein the BCMA CAR-expressing cell therapy comprises a cell expressing a BCAM CAR, wherein:
(i) the BCMA CAR comprises one or more of (e.g., all three of) heavy chain complementary determining region 1 (HCDR1), HCDR2, and HCDR3 listed in Table 3 or 5 and/or one or more of (e.g., all three of) light chain complementary determining region 1 (LCDR1), LCDR2, and LCDR3 listed in Table 4 or 5, or a sequence with 95-99% identify thereof;
(ii) the BCMA CAR comprises a heavy chain variable region (VH) listed in Table 2 or 5 and/or a light chain variable region (VL) listed in Table 2 or 5, or a sequence with 95-99% identify thereof;
(iii) the BCMA CAR comprises a BCMA scFv domain amino acid sequence listed in Table 2 or 5 (e.g., SEQ ID NO: 39, SEQ ID NO: 40, SEQ ID NO: 41, SEQ ID NO: 42, SEQ ID NO: 43, SEQ ID NO: 44, SEQ ID NO: 45, SEQ ID NO: 46, SEQ ID NO: 47, SEQ ID NO: 48, SEQ ID NO: 49, SEQ ID NO: 50, SEQ ID NO: 51, SEQ ID NO: 52, SEQ ID NO: 53, SEQ ID NO: 129, SEQ ID NO: 130, SEQ ID NO: 131, SEQ ID NO: 132, SEQ ID NO: 133, SEQ ID NO: 134, SEQ ID NO: 135, SEQ ID NO: 136, SEQ ID NO: 137, SEQ ID NO: 138, SEQ ID NO: 139, SEQ ID NO: 140, SEQ ID NO: 141, SEQ ID NO: 142, SEQ ID NO: 143, SEQ ID NO: 144, SEQ ID NO: 145, SEQ ID NO: 146, SEQ ID NO: 147, SEQ ID NO: 148, and SEQ ID NO: 149), or a sequence with 95-99% identify thereof;
(iv) the BCMA CAR comprises a full-length BCMA CAR amino acid sequence listed in Table 2 or 5 (e.g., residues 22-483 of SEQ ID NO: 109, residues 22-490 of SEQ ID NO: 99, residues 22-488 of SEQ ID NO: 100, residues 22-487 of SEQ ID NO: 101, residues 22-493 of SEQ ID NO: 102, residues 22-490 of SEQ ID NO: 103, residues 22-491 of SEQ ID NO: 104, residues 22-482 of SEQ ID NO: 105, residues 22-483 of SEQ ID NO: 106, residues 22-485 of SEQ ID NO: 107, residues 22-483 of SEQ ID NO: 108, residues 22-490 of SEQ ID NO: 110, residues 22-483 of SEQ ID NO: 111, residues 22-484 of SEQ ID NO: 112, residues 22-485 of SEQ ID NO: 113, residues 22-487 of SEQ ID NO: 213, residues 23-489 of SEQ ID NO: 214, residues 22-490 of SEQ ID NO: 215, residues 22-484 of SEQ ID NO: 216, residues 22-485 of SEQ ID NO: 217, residues 22-489 of SEQ ID NO: 218, residues 22-497 of SEQ ID NO: 219, residues 22-492 of SEQ ID NO: 220, residues 22-490 of SEQ ID NO: 221, residues 22-485 of SEQ ID NO: 222, residues 22-492 of SEQ ID NO: 223, residues 22-492 of SEQ ID NO: 224, residues 22-483 of SEQ ID NO: 225, residues 22-490 of SEQ ID NO: 226, residues 22-485 of SEQ ID NO: 227, residues 22-486 of SEQ ID NO: 228, residues 22-492 of SEQ ID NO: 229, residues 22-488 of SEQ ID NO: 230, residues 22-488 of SEQ ID NO: 231, residues 22-495 of SEQ ID NO: 232, residues 22-490 of SEQ ID NO: 233), or a sequence with 95-99% identify thereof; or
(v) the BCMA CAR is encoded by a nucleic acid sequence listed in Table 2 or 5 (e.g., SEQ ID NO: 54, SEQ ID NO: 55, SEQ ID NO: 56, SEQ ID NO: 57, SEQ ID NO: 58, SEQ ID NO: 59, SEQ ID NO: 60, SEQ ID NO: 61, SEQ ID NO: 62, SEQ ID NO: 63, SEQ ID NO: 64, SEQ ID NO: 65, SEQ ID NO: 66, SEQ ID NO: 67, SEQ ID NO: 68, SEQ ID NO: 150, SEQ ID NO: 151, SEQ ID NO: 152, SEQ ID NO: 153, SEQ ID NO: 154, SEQ ID NO: 155, SEQ ID NO: 156, SEQ ID NO: 157, SEQ ID NO: 158, SEQ ID NO: 159, SEQ ID NO: 160, SEQ ID NO: 161, SEQ ID NO: 162, SEQ ID NO: 163, SEQ ID NO: 164, SEQ ID NO: 165, SEQ ID NO: 166, SEQ ID NO: 167, SEQ ID NO: 168, SEQ ID NO: 169, SEQ ID NO: 170), or a sequence with 95-99% identify thereof.

88. The method of any one of claims 1-87, wherein the disease associated with the expression of BCMA is cancer, optionally wherein the cancer is a hematological cancer.

89. The method of any one of claims 1-88, wherein the disease associated with the expression of BCMA is an acute leukemia chosen from one or more of B-cell acute lymphoid leukemia (“BALL”), T-cell acute lymphoid leukemia (“TALL”), acute lymphoid leukemia (ALL); chronic myelogenous leukemia (CML), chronic lymphocytic leukemia (CLL); B cell prolymphocytic leukemia, blastic plasmacytoid dendritic cell neoplasm, Burkitt's lymphoma, diffuse large B cell lymphoma, follicular lymphoma, hairy cell leukemia, small cell- or a large cell-follicular lymphoma, malignant lymphoproliferative conditions, MALT lymphoma, mantle cell lymphoma, Marginal zone lymphoma, multiple myeloma, myelodysplasia and myelodysplastic syndrome, non-Hodgkin's lymphoma, plasmablastic lymphoma, plasmacytoid dendritic cell neoplasm, Waldenstrom macroglobulinemia; a prostate cancer (e.g., castrate-resistant or therapy-resistant prostate cancer, or metastatic prostate cancer), pancreatic cancer, lung cancer; or a plasma cell proliferative disorder (e.g., asymptomatic myeloma (smoldering multiple myeloma or indolent myeloma), monoclonal gammapathy of undetermined significance (MGUS), Waldenstrom's macroglobulinemia, plasmacytomas (e.g., plasma cell dyscrasia, solitary myeloma, solitary plasmacytoma, extramedullary plasmacytoma, and multiple plasmacytoma), systemic amyloid light chain amyloidosis, and POEMS syndrome (also known as Crow-Fukase syndrome, Takatsuki disease, and PEP syndrome)), or a combination thereof.

90. The method of any one of claims 1-89, wherein the disease associated with the expression of BCMA is ALL, CLL, DLBCL, or multiple myeloma.

91. The method of any one of claims 1-90, wherein the subject is a human patient.

92. A BCMA CAR-expressing cell therapy for use in a method of treatment of a subject having a disease associated with the expression of BCMA, the method comprising:
responsive to an increased value for one, two, three, four, five, or all of:
(i) the level or activity of CD4+ immune effector cells (e.g., CD4+ T cells) relative to the level or activity of CD8+ immune effector cells (e.g., CD8+ T cells) in the subject, e.g., in a sample from the subject (e.g., an apheresis sample (e.g., a leukapheresis sample), in a seed culture at the start of the manufacturing of a BCMA CAR-expressing cell therapy (e.g., a leukapheresis sample after monocytes are removed using elutriation)), or in the subject's peripheral blood and/or bone marrow prior to the administration of the BCMA CAR-expressing cell therapy,
(ii) the level or activity of CD8+ Tscm (stem cell memory T cells) in the subject, e.g., in a sample from the subject (e.g., an apheresis sample (e.g., a leukapheresis sample) or a seed culture at the start of the manufacturing of a BCMA CAR-expressing cell therapy (e.g., a leukapheresis sample after monocytes are removed using elutriation)),
(iii) the level or activity of HLADR-CD95+CD27+CD8+ cells in the subject, e.g., in a sample from the subject (e.g., an apheresis sample (e.g., a leukapheresis sample) or a seed culture at the start of the manufacturing of a BCMA CAR-expressing cell therapy (e.g., a leukapheresis sample after monocytes are removed using elutriation)),
(iv) the level or activity of CD45RO−CD27+CD8+ cells in the subject, e.g., in a sample from the subject (e.g., an apheresis sample (e.g., a leukapheresis sample) or a seed culture at the start of the manufacturing of a BCMA CAR-expressing cell therapy (e.g., a leukapheresis sample after monocytes are removed using elutriation)),
(v) the level or activity of CCR7+CD45RO−CD27+CD8+ cells in the subject, e.g., in a sample from the subject (e.g., an apheresis sample (e.g., a leukapheresis sample) or a seed culture at the start of the manufacturing of a BCMA CAR-expressing cell therapy (e.g., a leukapheresis sample after monocytes are removed using elutriation)), or
(vi) the proliferation of seeded cells from the subject during manufacturing of a BCMA CAR-expressing cell therapy,
as compared to a reference value, e.g., a non-responder reference value, performing:
manufacturing a BCMA CAR-expressing cell therapy using cells (e.g., T cells) from the subject and administering the BCMA CAR-expressing cell therapy to the subject; or
administering, e.g., initiating administering or continuing administering, a BCMA CAR-expressing cell therapy to the subject,
thereby treating the subject having the disease associated with the expression of BCMA.

93. A BCMA CAR-expressing cell therapy for use in a method of treatment of a subject having a disease associated with the expression of BCMA, the method comprising:
responsive to a decreased value for one, two, three, four, five, or all of:
(i) the level or activity of CD4+ immune effector cells (e.g., CD4+ T cells) relative to the level or activity of CD8+ immune effector cells (e.g., CD8+ T cells) in the subject, e.g., in a sample from the subject (e.g., an apheresis sample (e.g., a leukapheresis sample), in a seed culture at the start of the manufacturing of a BCMA CAR-expressing cell therapy (e.g., a leukapheresis sample after monocytes are removed using elutriation)), or in the subject's peripheral blood and/or bone marrow prior to the administration of the BCMA CAR-expressing cell therapy,
(ii) the level or activity of CD8+ Tscm (stem cell memory T cells) in the subject, e.g., in a sample from the subject (e.g., an apheresis sample (e.g., a leukapheresis sample) or a seed culture at the start of the manufacturing of a BCMA CAR-expressing cell therapy (e.g., a leukapheresis sample after monocytes are removed using elutriation)),
(iii) the level or activity of HLADR-CD95+CD27+CD8+ cells in the subject, e.g., in a sample from the subject (e.g., an apheresis sample (e.g., a leukapheresis sample) or a seed culture at the start of the manufacturing of a BCMA CAR-expressing cell therapy (e.g., a leukapheresis sample after monocytes are removed using elutriation)),
(iv) the level or activity of CD45RO−CD27+CD8+ cells in the subject, e.g., in a sample from the subject (e.g., an apheresis sample (e.g., a leukapheresis sample) or a seed culture at the start of the manufacturing of a BCMA CAR-expressing cell therapy (e.g., a leukapheresis sample after monocytes are removed using elutriation)),
(v) the level or activity of CCR7+CD45RO−CD27+CD8+ cells in the subject, e.g., in a sample from the subject (e.g., an apheresis sample (e.g., a leukapheresis sample) or a seed culture at the start of the manufacturing of a BCMA CAR-expressing cell therapy (e.g., a leukapheresis sample after monocytes are removed using elutriation)), or
(vi) the proliferation of seeded cells from the subject during manufacturing of a BCMA CAR-expressing cell therapy,
as compared to a reference value, e.g., a responder reference value, performing one, two, three, four, five, six, seven, or all of:
administering an altered dosing regimen of a BCMA CAR-expressing cell therapy (e.g., a dosing regimen with a higher dose and/or more frequent administration than a reference dosing regimen) to the subject;
administering a second therapy (e.g., a second therapy that is not a BCMA CAR-expressing cell therapy) to the subject;
administering a BCMA CAR-expressing cell therapy and a second therapy to the subject;
discontinuing administration of a BCMA CAR-expressing cell therapy and optionally administering a second therapy to the subject;
modifying a manufacturing process of a BCMA CAR-expressing cell therapy, e.g., enriching for CD4+ immune effector cells (e.g., CD4+ T cells) relative to CD8+ immune effector cells (CD8+ T cells) prior to introducing a nucleic acid encoding a BCMA CAR, and administering the BCMA CAR-expressing cell therapy generated by the modified manufacturing process to the subject;
modifying a manufacturing process of a BCMA CAR-expressing cell therapy, e.g., enriching for CD8+ Tscm (e.g., HLADR-CD95+CD27+CD8+ cells, CD45RO−CD27+CD8+ cells, or CCR7+CD45RO−CD27+CD8+ cells) prior to introducing a nucleic acid encoding a BCMA CAR, and administering the BCMA CAR-expressing cell therapy generated by the modified manufacturing process to the subject;
modifying a manufacturing process of the BCMA CAR-expressing cell therapy, e.g., increasing the proliferation of seeded cells from the subject during the manufacturing of the BCMA CAR-expressing cell therapy, and administering the BCMA CAR-expressing cell therapy generated by the modified manufacturing process to the subject; or
administering a pretreatment to the subject, wherein the pretreatment increases the ratio of the amount of CD4+ immune effector cells (e.g., CD4+ T cells) to the amount of CD8+ immune effector cells (e.g., CD8+ T cells) in the subject, e.g., in a sample from the subject (e.g., an apheresis sample (e.g., a leukapheresis sample), a seed culture at the start of the manufacturing of a BCMA CAR-expressing cell therapy (e.g., a leukapheresis sample after monocytes are removed using elutriation)), or in the subject's peripheral blood and/or bone marrow prior to the administration of the BCMA CAR-expressing cell therapy, e.g., the pretreatment increases the ratio to greater than or equal to 1.6 (e.g., between 1.6 and 5, e.g., between 1.6 and 3.5), manufacturing the BCMA CAR-expressing cell therapy using cells (e.g., T cells) from the subject, and administering the BCMA CAR-expressing cell therapy to the subject,
thereby treating the subject having the disease associated with the expression of BCMA.

The application's sequence listing, which the Patent Office published only in electronic form, follows.

SEQUENCE LISTING (2036 sequences)

SEQ ID NO: 1-38 - skipped (38 entries)

SEQ ID NO: 39 - protein, 246 aa, Artificial Sequence
  source: /note="Description of Artificial Sequence: Synthetic polypeptide"
QVQLVESGGGLVQPGRSLRLSCAASGFTFSNYAMSWVRQAPGKGLGWVSGISRSGENTYYADSVKGRFTISRDNSKNTLYLQMNSLRDEDTAVYYCARSPAHYYGGMDVWGQGTTVTVSSASGGGGSGGRASGGGGSDIVLTQSPGTLSLSPGERATLSCRASQSISSSFLAWYQQKPGQAPRLLIYGASRRATGIPDRFSGSGSGTDFTLTISRLEPEDSAVYYCQQYHSSPSWTFGQGTKLEIK

SEQ ID NO: 40 - protein, 244 aa, Artificial Sequence
  source: /note="Description of Artificial Sequence: Synthetic polypeptide"
QVQLVESGGGLVQPGRSLRLSCAASGFTFDDYAMHWVRQAPGKGLEWVSGISWNSGSIGYADSVKGRFTISRDNAKNSLYLQMNSLRAEDTALYYCSVHSFLAYWGQGTLVTVSSASGGGGSGGRASGGGGSDIVMTQTPLSLPVTPGEPASISCRSSQSLLHSNGYNYLDWYLQKPGQSPQLLIYLGSNRASGVPDRFSGSGSGTDFTLKISRVEAEDVGVYYCMQALQTPYTFGQGTKVEIK

SEQ ID NO: 41 - protein, 243 aa, Artificial Sequence
  source: /note="Description of Artificial Sequence: Synthetic polypeptide"
EVQLLESGGGLVQPGGSLRLSCAVSGFALSNHGMSWVRRAPGKGLEWVSGIVYSGSTYYAASVKGRFTISRDNSRNTLYLQMNSLRPEDTAIYYCSAHGGESDVWGQGTTVTVSSASGGGGSGGRASGGGGSDIVMTQTPLSLSVTPGQPASISCKSSQSLLRNDGKTPLYWYLQKAGQPPQLLIYEVSNRFSGVPDRFSGSGSGTDFTLKISRVEAEDVGAYYCMQNIQFPSFGGGTKLEIK

SEQ ID NO: 42 - protein, 249 aa, Artificial Sequence
  source: /note="Description of Artificial Sequence: Synthetic polypeptide"
QVQLVQSGAEVRKTGASVKVSCKASGYIFDNFGINWVRQAPGQGLEWMGWINPKNNNTNYAQKFQGRVTITADESTNTAYMEVSSLRSEDTAVYYCARGPYYYQSYMDVWGQGTMVTVSSASGGGGSGGRASGGGGSDIVMTQTPLSLPVTPGEPASISCRSSQSLLHSNGYNYLNWYLQKPGQSPQLLIYLGSKRASGVPDRFSGSGSGTDFTLHITRVGAEDVGVYYCMQALQTPYTFGQGTKLEIK

SEQ ID NO: 43 - protein, 246 aa, Artificial Sequence
  source: /note="Description of Artificial Sequence: Synthetic polypeptide"
QVQLQESGGGLVQPGGSLRLSCAASGFTFSSDAMTWVRQAPGKGLEWVSVISGSGGTTYYADSVKGRFTISRDNSKNTLYLQMNSLRAEDTAVYYCAKLDSSGYYYARGPRYWGQGTLVTVSSASGGGGSGGRASGGGGSDIQLTQSPSSLSASVGDRVTITCRASQSISSYLNWYQQKPGKAPKLLIYGASTLASGVPARFSGSGSGTHFTLTINSLQSEDSATYYCQQSYKRASFGQGTKVEIK

SEQ ID NO: 44 - protein, 247 aa, Artificial Sequence
  source: /note="Description of Artificial Sequence: Synthetic polypeptide"
QVQLVQSGAEVKKPGASVKVSCKASGYTFSNYGITWVRQAPGQGLEWMGWISAYNGNTNYAQKFQGRVTMTRNTSISTAYMELSSLRSEDTAVYYCARGPYYYYMDVWGKGTMVTVSSASGGGGSGGRASGGGGSEIVMTQSPLSLPVTPGEPASISCRSSQSLLYSNGYNYVDWYLQKPGQSPQLLIYLGSNRASGVPDRFSGSGSGTDFKLQISRVEAEDVGIYYCMQGRQFPYSFGQGTKVEIK

SEQ ID NO: 45 - protein, 238 aa, Artificial Sequence
  source: /note="Description of Artificial Sequence: Synthetic polypeptide"
EVQLLETGGGLVQPGGSLRLSCAVSGFALSNHGMSWVRRAPGKGLEWVSGIVYSGSTYYAASVKGRFTISRDNSRNTLYLQMNSLRPEDTAIYYCSAHGGESDVWGQGTTVTVSSASGGGGSGGRASGGGGSEIVLTQSPATLSVSPGESATLSCRASQSVSSNLAWYQQKPGQAPRLLIYGASTRASGIPDRFSGSGSGTDFTLTISSLQAEDVAVYYCQQYGSSLTFGGGTKVEIK

SEQ ID NO: 46 - protein, 239 aa, Artificial Sequence
  source: /note="Description of Artificial Sequence: Synthetic polypeptide"
EVQLVETGGGLVQPGGSLRLSCAVSGFALSNHGMSWVRRAPGKGLEWVSGIVYSGSTYYAASVKGRFTISRDNSRNTLYLQMNSLRPEDTAIYYCSAHGGESDVWGQGTTVTVSSASGGGGSGGRASGGGGSEIVMTQSPATLSVSPGERATLSCRASQSVSSKLAWYQQKPGQAPRLLMYGASIRATGIPDRFSGSGSGTEFTLTISSLEPEDFAVYYCQQYGSSSWTFGQGTKVEIK

SEQ ID NO: 47 - protein, 241 aa, Artificial Sequence
  source: /note="Description of Artificial Sequence: Synthetic polypeptide"
EVQLVETGGGVVQPGGSLRLSCAVSGFALSNHGMSWVRRAPGKGLEWVSGIVYSGSTYYAASVKGRFTISRDNSRNTLYLQMNSLRPEDTAIYYCSAHGGESDVWGQGTTVTVSSASGGGGSGGRASGGGGSEIVLTQSPGTLSLSPGERATLSCRASQSVGSTNLAWYQQKPGQAPRLLIYDASNRATGIPDRFSGGGSGTDFTLTISRLEPEDFAVYYCQQYGSSPPWTFGQGTKVEIK

SEQ ID NO: 48 - protein, 239 aa, Artificial Sequence
  source: /note="Description of Artificial Sequence: Synthetic polypeptide"
QVQLVESGGGLVKPGGSLRLSCAASGFTFSDYYMSWIRQAPGKGLEWVSYISSSGSTIYYADSVKGRFTISRDNAKNSLYLQMNSLRAEDTAVYYCARESGDGMDVWGQGTTVTVSSASGGGGSGGRASGGGGSDIQMTQSPSSLSASVGDRVTITCRASQSISSYLNWYQQKPGKAPKLLIYAASSLQSGVPSRFSGSGSGTDFTLTISSLQPEDFATYYCQQSYTLAFGQGTKVDIK

SEQ ID NO: 49 - protein, 239 aa, Artificial Sequence
  source: /note="Description of Artificial Sequence: Synthetic polypeptide"
EVQLVESGGGLVQPGGSLRLSCAVSGFALSNHGMSWVRRAPGKGLEWVSGIVYSGSTYYAASVKGRFTISRDNSRNTLYLQMNSLRPEDTAIYYCSAHGGESDVWGQGTTVTVSSASGGGGSGGRASGGGGSDIQLTQSPSSLSASVGDRVTITCRASQSISSYLNWYQQKPGKAPKLLIYAASSLQSGVPSRFSGSGSGTDFTLTISSLQPEDFATYYCQQSYSTPYTFGQGTKVEIK

SEQ ID NO: 50 - protein, 246 aa, Artificial Sequence
  source: /note="Description of Artificial Sequence: Synthetic polypeptide"
QVQLVQSGGGLVKPGGSLRLSCAASGFTFSDYYMSWIRQAPGKGLEWVSYISSSGNTIYYADSVKGRFTISRDNAKNSLYLQMNSLRAEDTAVYYCARSTMVREDYWGQGTLVTVSSASGGGGSGGRASGGGGSDIVLTQSPLSLPVTLGQPASISCKSSESLVHNSGKTYLNWFHQRPGQSPRRLIYEVSNRDSGVPDRFTGSGSGTDFTLKISRVEAEDVGVYYCMQGTHWPGTFGQGTKLEIK

SEQ ID NO: 51 - protein, 239 aa, Artificial Sequence
  source: /note="Description of Artificial Sequence: Synthetic polypeptide"
QVQLVESGGGLVQPGGSLRLSCAVSGFALSNHGMSWVRRAPGKGLEWVSGIVYSGSTYYAASVKGRFTISRDNSRNTLYLQMNSLRPEDTAIYYCSAHGGESDVWGQGTTVTVSSASGGGGSGGRASGGGGSDIRLTQSPSPLSASVGDRVTITCQASEDINKFLNWYHQTPGKAPKLLIYDASTLQTGVPSRFSGSGSGTDFTLTINSLQPEDIGTYYCQQYESLPLTFGGGTKVEIK

SEQ ID NO: 52 - protein, 240 aa, Artificial Sequence
  source: /note="Description of Artificial Sequence: Synthetic polypeptide"
EVQLVETGGGLVQPGGSLRLSCAVSGFALSNHGMSWVRRAPGKGLEWVSGIVYSGSTYYAASVKGRFTISRDNSRNTLYLQMNSLRPEDTAIYYCSAHGGESDVWGQGTTVTVSSASGGGGSGGRASGGGGSETTLTQSPATLSVSPGERATLSCRASQSVGSNLAWYQQKPGQGPRLLIYGASTRATGIPARFSGSGSGTEFTLTISSLQPEDFAVYYCQQYNDWLPVTFGQGTKVEIK

SEQ ID NO: 53 - protein, 241 aa, Artificial Sequence
  source: /note="Description of Artificial Sequence: Synthetic polypeptide"
EVQLVESGGGLVQPGGSLRLSCAVSGFALSNHGMSWVRRAPGKGLEWVSGIVYSGSTYYAASVKGRFTISRDNSRNTLYLQMNSLRPEDTAIYYCSAHGGESDVWGQGTTVTVSSASGGGGSGGRASGGGGSEIVLTQSPGTLSLSPGERATLSCRASQSIGSSSLAWYQQKPGQAPRLLMYGASSRASGIPDRFSGSGSGTDFTLTISRLEPEDFAVYYCQQYAGSPPFTFGQGTKVEIK

SEQ ID NO: 54 - DNA, 738 bp, Artificial Sequence
  source: /note="Description of Artificial Sequence: Synthetic polynucleotide"
caagtgcaactcgtggaatctggtggaggactcgtgcaacccggaagatcgcttagactgtcgtgtgccgccagcgggttcactttctcgaactacgcgatgtcctgggtccgccaggcacccggaaagggactcggttgggtgtccggcatttcccggtccggcgaaaatacctactacgccgactccgtgaagggccgcttcaccatctcaagggacaacagcaaaaacaccctgtacttgcaaatgaactccctgcgggatgaagatacagccgtgtactattgcgcccggtcgcctgcccattactacggcggaatggacgtctggggacagggaaccactgtgactgtcagcagcgcgtcgggtggcggcggctcagggggtcgggcctccggggggggagggtccgacatcgtgctgacccagtccccgggaaccctgagcctgagcccgggagagcgcgcgaccctgtcatgccgggcatcccagagcattagctcctcctttctcgcctggtatcagcagaagcccggacaggccccgaggctgctgatctacggcgctagcagaagggctaccggaatcccagaccggttctccggctccggttccgggaccgatttcacccttactatctcgcgcctggaacctgaggactccgccgtctactactgccagcagtaccactcatccccgtcgtggacgttcggacagggcaccaagctggagattaag

SEQ ID NO: 55 - DNA, 732 bp, Artificial Sequence
  source: /note="Description of Artificial Sequence: Synthetic polynucleotide"
caagtgcaactcgtcgaatccggtggaggtctggtccaacctggtagaagcctgagactgtcgtgtgcggccagcggattcacctttgatgactatgctatgcactgggtgcggcaggccccaggaaagggcctggaatgggtgtcgggaattagctggaactccgggtccattggctacgccgactccgtgaagggccgcttcaccatctcccgcgacaacgcaaagaactccctgtacttgcaaatgaactcgctcagggctgaggataccgcgctgtactactgctccgtgcattccttcctggcctactggggacagggaactctggtcaccgtgtcgagcgcctccggcggcgggggctcgggtggacgggcctcgggcggaggggggtccgacatcgtgatgacccagaccccgctgagcttgcccgtgactcccggagagcctgcatccatctcctgccggtcatcccagtcccttctccactccaacggatacaactacctcgactggtacctccagaagccgggacagagccctcagcttctgatctacctggggtcaaatagagcctcaggagtgccggatcggttcagcggatctggttcgggaactgatttcactctgaagatttcccgcgtggaagccgaggacgtgggcgtctactactgtatgcaggcgctgcagaccccctataccttcggccaagggacgaaagtggagatcaag

SEQ ID NO: 56 - DNA, 729 bp, Artificial Sequence
  source: /note="Description of Artificial Sequence: Synthetic polynucleotide"
gaagtgcaattgttggaatctggaggaggacttgtgcagcctggaggatcactgagactttcgtgtgcggtgtcaggcttcgccctgagcaaccacggcatgagctgggtgcggagagccccggggaagggtctggaatgggtgtccgggatcgtctactccggttcaacttactacgccgcaagcgtgaagggtcgcttcaccatttcccgcgataactcccggaacaccctgtacctccaaatgaactccctgcggcccgaggacaccgccatctactactgttccgcgcatggaggagagtccgatgtctggggacagggcactaccgtgaccgtgtcgagcgcctcggggggaggaggctccggcggtcgcgcctccggggggggtggcagcgacattgtgatgacgcagactccactctcgctgtccgtgaccccgggacagcccgcgtccatctcgtgcaagagctcccagagcctgctgaggaacgacggaaagactcctctgtattggtacctccagaaggctggacagcccccgcaactgctcatctacgaagtgtcaaatcgcttctccggggtgccggatcggttttccggctcgggatcgggcaccgacttcaccctgaaaatctccagggtcgaggccgaggacgtgggagcctactactgcatgcaaaacatccagttcccttccttcggcggcggcacaaagctggagattaag

SEQ ID NO: 57 - DNA, 747 bp, Artificial Sequence
  source: /note="Description of Artificial Sequence: Synthetic polynucleotide"
caagtccaactcgtccagtccggcgcagaagtcagaaaaaccggtgctagcgtgaaagtgtcctgcaaggcctccggctacattttcgataacttcggaatcaactgggtcagacaggccccgggccaggggctggaatggatgggatggatcaaccccaagaacaacaacaccaactacgcacagaagttccagggccgcgtgactatcaccgccgatgaatcgaccaataccgcctacatggaggtgtcctccctgcggtcggaggacactgccgtgtattactgcgcgaggggcccatactactaccaaagctacatggacgtctggggacagggaaccatggtgaccgtgtcatccgcctccggtggtggaggctccggggggcgggcttcaggaggcggaggaagcgatattgtgatgacccagactccgcttagcctgcccgtgactcctggagaaccggcctccatttcctgccggtcctcgcaatcactcctgcattccaacggttacaactacctgaattggtacctccagaagcctggccagtcgccccagttgctgatctatctgggctcgaagcgcgcctccggggtgcctgaccggtttagcggatctgggagcggcacggacttcactctccacatcacccgcgtgggagcggaggacgtgggagtgtactactgtatgcaggcgctgcagactccgtacacattcggacagggcaccaagctggagatcaag

SEQ ID NO: 58 - DNA, 738 bp, Artificial Sequence
  source: /note="Description of Artificial Sequence: Synthetic polynucleotide"
caagtgcaacttcaagaatcaggcggaggactcgtgcagcccggaggatcattgcggctctcgtgcgccgcctcgggcttcaccttctcgagcgacgccatgacctgggtccgccaggccccggggaaggggctggaatgggtgtctgtgatttccggctccgggggaactacgtactacgccgattccgtgaaaggtcgcttcactatctcccgggacaacagcaagaacaccctttatctgcaaatgaattccctccgcgccgaggacaccgccgtgtactactgcgccaagctggactcctcgggctactactatgcccggggtccgagatactggggacagggaaccctcgtgaccgtgtcctccgcgtccggcggaggagggtcgggagggcgggcctccggcggcggcggttcggacatccagctgacccagtccccatcctcactgagcgcaagcgtgggcgacagagtcaccattacatgcagggcgtcccagagcatcagctcctacctgaactggtaccaacagaagcctggaaaggctcctaagctgttgatctacggggcttcgaccctggcatccggggtgcccgcgaggtttagcggaagcggtagcggcactcacttcactctgaccattaacagcctccagtccgaggattcagccacttactactgtcagcagtcctacaagcgggccagcttcggacagggcactaaggtcgagatcaag

SEQ ID NO: 59 - DNA, 741 bp, Artificial Sequence
  source: /note="Description of Artificial Sequence: Synthetic polynucleotide"
caagtccaactggtccagagcggtgcagaagtgaagaagcccggagcgagcgtgaaagtgtcctgcaaggcttccgggtacaccttctccaactacggcatcacttgggtgcgccaggccccgggacagggcctggaatggatggggtggatttccgcgtacaacggcaatacgaactacgctcagaagttccagggtagagtgaccatgactaggaacacctccatttccaccgcctacatggaactgtcctccctgcggagcgaggacaccgccgtgtactattgcgcccggggaccatactactactacatggatgtctgggggaaggggactatggtcaccgtgtcatccgcctcgggaggcggcggatcaggaggacgcgcctctggtggtggaggatcggagatcgtgatgacccagagccctctctccttgcccgtgactcctggggagcccgcatccatttcatgccggagctcccagtcacttctctactccaacggctataactacgtggattggtacctccaaaagccgggccagagcccgcagctgctgatctacctgggctcgaacagggccagcggagtgcctgaccggttctccgggtcgggaagcgggaccgacttcaagctgcaaatctcgagagtggaggccgaggacgtgggaatctactactgtatgcagggccgccagtttccgtactcgttcggacagggcaccaaagtggaaatcaag

SEQ ID NO: 60 - DNA, 714 bp, Artificial Sequence
  source: /note="Description of Artificial Sequence: Synthetic polynucleotide"
gaagtgcaattgctcgaaactggaggaggtctggtgcaacctggaggatcacttcgcctgtcctgcgccgtgtcgggctttgccctgtccaaccatggaatgagctgggtccgccgcgcgccggggaagggcctcgaatgggtgtccggcatcgtctactccggctccacctactacgccgcgtccgtgaagggccggttcacgatttcacgggacaactcgcggaacaccctgtacctccaaatgaattcccttcggccggaggatactgccatctactactgctccgcccacggtggcgaatccgacgtctggggccagggaaccaccgtgaccgtgtccagcgcgtccgggggaggaggaagcgggggtagagcatcgggtggaggcggatcagagatcgtgctgacccagtcccccgccaccttgagcgtgtcaccaggagagtccgccaccctgtcatgccgcgccagccagtccgtgtcctccaacctggcttggtaccagcagaagccggggcaggcccctagactcctgatctatggggcgtcgacccgggcatctggaattcccgataggttcagcggatcgggctcgggcactgacttcactctgaccatctcctcgctgcaagccgaggacgtggctgtgtactactgtcagcagtacggaagctccctgactttcggtggcgggaccaaagtcgagattaag

SEQ ID NO: 61 - DNA, 717 bp, Artificial Sequence
  source: /note="Description of Artificial Sequence: Synthetic polynucleotide"
gaagtgcaattggtggaaactggaggaggacttgtgcaacctggaggatcattgagactgagctgcgcagtgtcgggattcgccctgagcaaccatggaatgtcctgggtcagaagggcccctggaaaaggcctcgaatgggtgtcagggatcgtgtactccggttccacttactacgccgcctccgtgaaggggcgcttcactatctcacgggataactcccgcaataccctgtacctccaaatgaacagcctgcggccggaggataccgccatctactactgttccgcccacggtggagagtctgacgtctggggccagggaactaccgtgaccgtgtcctccgcgtccggcggtggagggagcggcggccgcgccagcggcggcggaggctccgagatcgtgatgacccagagccccgctactctgtcggtgtcgcccggagaaagggcgaccctgtcctgccgggcgtcgcagtccgtgagcagcaagctggcttggtaccagcagaagccgggccaggcaccacgcctgcttatgtacggtgcctccattcgggccaccggaatcccggaccggttctcggggtcggggtccggtaccgagttcacactgaccatttcctcgctcgagcccgaggactttgccgtctattactgccagcagtacggctcctcctcatggacgttcggccaggggaccaaggtcgaaatcaag

SEQ ID NO: 62 - DNA, 723 bp, Artificial Sequence
  source: /note="Description of Artificial Sequence: Synthetic polynucleotide"
gaagtgcaattggtggagactggaggaggagtggtgcaacctggaggaagcctgagactgtcatgcgcggtgtcgggcttcgccctctccaaccacggaatgtcctgggtccgccgggcccctgggaaaggacttgaatgggtgtccggcatcgtgtactcgggttccacctactacgcggcctcagtgaagggccggtttactattagccgcgacaactccagaaacacactgtacctccaaatgaactcgctgcggccggaagataccgctatctactactgctccgcccatgggggagagtcggacgtctggggacagggcaccactgtcactgtgtccagcgcttccggcggtggtggaagcgggggacgggcctcaggaggcggtggcagcgagattgtgctgacccagtcccccgggaccctgagcctgtccccgggagaaagggccaccctctcctgtcgggcatcccagtccgtggggtctactaaccttgcatggtaccagcagaagcccggccaggcccctcgcctgctgatctacgacgcgtccaatagagccaccggcatcccggatcgcttcagcggaggcggatcgggcaccgacttcaccctcaccatttcaaggctggaaccggaggacttcgccgtgtactactgccagcagtatggttcgtccccaccctggacgttcggccaggggactaaggtcgagatcaag

SEQ ID NO: 63 - DNA, 717 bp, Artificial Sequence
  source: /note="Description of Artificial Sequence: Synthetic polynucleotide"
caagtgcaactcgtggaatctggtggaggactcgtgaaacctggaggatcattgagactgtcatgcgcggcctcgggattcacgttctccgattactacatgagctggattcgccaggctccggggaagggactggaatgggtgtcctacatttcctcatccggctccaccatctactacgcggactccgtgaaggggagattcaccattagccgcgataacgccaagaacagcctgtaccttcagatgaactccctgcgggctgaagatactgccgtctactactgcgcaagggagagcggagatgggatggacgtctggggacagggtaccactgtgaccgtgtcgtcggcctccggcggagggggttcgggtggaagggccagcggcggcggaggcagcgacatccagatgacccagtccccctcatcgctgtccgcctccgtgggcgaccgcgtcaccatcacatgccgggcctcacagtcgatctcctcctacctcaattggtatcagcagaagcccggaaaggcccctaagcttctgatctacgcagcgtcctccctgcaatccggggtcccatctcggttctccggctcgggcagcggtaccgacttcactctgaccatctcgagcctgcagccggaggacttcgccacttactactgtcagcaaagctacaccctcgcgtttggccagggcaccaaagtggacatcaag

SEQ ID NO: 64 - DNA, 717 bp, Artificial Sequence
  source: /note="Description of Artificial Sequence: Synthetic polynucleotide"
gaagtgcaattggtggaatcagggggaggacttgtgcagcctggaggatcgctgagactgtcatgtgccgtgtccggctttgccctgtccaaccacgggatgtcctgggtccgccgcgcgcctggaaagggcctcgaatgggtgtcgggtattgtgtacagcggtagcacctactatgccgcatccgtgaaggggagattcaccatcagccgggacaactccaggaacactctgtacctccaaatgaattcgctgaggccagaggacactgccatctactactgctccgcgcatggcggagagtccgacgtctggggacaggggaccaccgtgaccgtgtctagcgcgtccggcggaggcggcagcgggggtcgggcatcagggggcggcggatcggacatccagctcacccagtccccgagctcgctgtccgcctccgtgggagatcgggtcaccatcacgtgccgcgccagccagtcgatttcctcctacctgaactggtaccaacagaagcccggaaaagccccgaagcttctcatctacgccgcctcgagcctgcagtcaggagtgccctcacggttctccggctccggttccggtactgatttcaccctgaccatttcctccctgcaaccggaggacttcgctacttactactgccagcagtcgtactccaccccctacactttcggacaaggcaccaaggtcgaaatcaag

SEQ ID NO: 65 - DNA, 738 bp, Artificial Sequence
  source: /note="Description of Artificial Sequence: Synthetic polynucleotide"
caagtgcaactggtgcaaagcggaggaggattggtcaaacccggaggaagcctgagactgtcatgcgcggcctctggattcaccttctccgattactacatgtcatggatcagacaggccccggggaagggcctcgaatgggtgtcctacatctcgtcctccgggaacaccatctactacgccgacagcgtgaagggccgctttaccatttcccgcgacaacgcaaagaactcgctgtaccttcagatgaattccctgcgggctgaagataccgcggtgtactattgcgcccggtccactatggtccgggaggactactggggacagggcacactcgtgaccgtgtccagcgcgagcgggggtggaggcagcggtggacgcgcctccggcggcggcggttcagacatcgtgctgactcagtcgcccctgtcgctgccggtcaccctgggccaaccggcctcaattagctgcaagtcctcggagagcctggtgcacaactcaggaaagacttacctgaactggttccatcagcggcctggacagtccccacggaggctcatctatgaagtgtccaacagggattcgggggtgcccgaccgcttcactggctccgggtccggcaccgacttcaccttgaaaatctccagagtggaagccgaggacgtgggcgtgtactactgtatgcagggtacccactggcctggaacctttggacaaggaactaagctcgagattaag

SEQ ID NO: 66 - DNA, 717 bp, Artificial Sequence
  source: /note="Description of Artificial Sequence: Synthetic polynucleotide"
caagtgcaactcgtggaatctggtggaggactcgtgcaacccggtggaagccttaggctgtcgtgcgccgtcagcgggtttgctctgagcaaccatggaatgtcctgggtccgccgggcaccgggaaaagggctggaatgggtgtccggcatcgtgtacagcgggtcaacctattacgccgcgtccgtgaagggcagattcactatctcaagagacaacagccggaacaccctgtacttgcaaatgaattccctgcgccccgaggacaccgccatctactactgctccgcccacggaggagagtcggacgtgtggggccagggaacgactgtgactgtgtccagcgcatcaggagggggtggttcgggcggccgggcctcggggggaggaggttccgacattcggctgacccagtccccgtccccactgtcggcctccgtcggcgaccgcgtgaccatcacttgtcaggcgtccgaggacattaacaagttcctgaactggtaccaccagacccctggaaaggcccccaagctgctgatctacgatgcctcgacccttcaaactggagtgcctagccggttctccgggtccggctccggcactgatttcactctgaccatcaactcattgcagccggaagatatcgggacctactattgccagcagtacgaatccctcccgctcacattcggcgggggaaccaaggtcgagattaag

SEQ ID NO: 67 - DNA, 720 bp, Artificial Sequence
  source: /note="Description of Artificial Sequence: Synthetic polynucleotide"
gaagtgcaattggtggaaactggaggaggacttgtgcaacctggaggatcattgcggctctcatgcgctgtctccggcttcgccctgtcaaatcacgggatgtcgtgggtcagacgggccccgggaaagggtctggaatgggtgtcggggattgtgtacagcggctccacctactacgccgcttcggtcaagggccgcttcactatttcacgggacaacagccgcaacaccctctatctgcaaatgaactctctccgcccggaggataccgccatctactactgctccgcacacggcggcgaatccgacgtgtggggacagggaaccactgtcaccgtgtcgtccgcatccggtggcggaggatcgggtggccgggcctccgggggcggcggcagcgagactaccctgacccagtcccctgccactctgtccgtgagcccgggagagagagccacccttagctgccgggccagccagagcgtgggctccaacctggcctggtaccagcagaagccaggacagggtcccaggctgctgatctacggagcctccactcgcgcgaccggcatccccgcgaggttctccgggtcgggttccgggaccgagttcaccctgaccatctcctccctccaaccggaggacttcgcggtgtactactgtcagcagtacaacgattggctgcccgtgacatttggacaggggacgaaggtggaaatcaaa

SEQ ID NO: 68 - DNA, 723 bp, Artificial Sequence
  source: /note="Description of Artificial Sequence: Synthetic polynucleotide"
gaagtgcaattggtggaatctggtggaggacttgtgcaacctggaggatcactgagactgtcatgcgcggtgtccggttttgccctgagcaatcatgggatgtcgtgggtccggcgcgcccccggaaagggtctggaatgggtgtcgggtatcgtctactccgggagcacttactacgccgcgagcgtgaagggccgcttcaccatttcccgcgataactcccgcaacaccctgtacttgcaaatgaactcgctccggcctgaggacactgccatctactactgctccgcacacggaggagaatccgacgtgtggggccagggaactaccgtgaccgtcagcagcgcctccggcggcgggggctcaggcggacgggctagcggcggcggtggctccgagatcgtgctgacccagtcgcctggcactctctcgctgagccccggggaaagggcaaccctgtcctgtcgggccagccagtccattggatcatcctccctcgcctggtatcagcagaaaccgggacaggctccgcggctgcttatgtatggggccagctcaagagcctccggcattcccgaccggttctccgggtccggttccggcaccgatttcaccctgactatctcgaggctggagccagaggacttcgccgtgtactactgccagcagtacgcggggtccccgccgttcacgttcggacagggaaccaaggtcgagatcaag

SEQ ID NO: 69 - protein, 120 aa, Artificial Sequence
  source: /note="Description of Artificial Sequence: Synthetic polypeptide"
QVQLVESGGGLVQPGRSLRLSCAASGFTFSNYAMSWVRQAPGKGLGWVSGISRSGENTYYADSVKGRFTISRDNSKNTLYLQMNSLRDEDTAVYYCARSPAHYYGGMDVWGQGTTVTVSS

SEQ ID NO: 70 - protein, 115 aa, Artificial Sequence
  source: /note="Description of Artificial Sequence: Synthetic polypeptide"
QVQLVESGGGLVQPGRSLRLSCAASGFTFDDYAMHWVRQAPGKGLEWVSGISWNSGSIGYADSVKGRFTISRDNAKNSLYLQMNSLRAEDTALYYCSVHSFLAYWGQGTLVTVSS

SEQ ID NO: 71 - protein, 115 aa, Artificial Sequence
  source: /note="Description of Artificial Sequence: Synthetic polypeptide"
EVQLLESGGGLVQPGGSLRLSCAVSGFALSNHGMSWVRRAPGKGLEWVSGIVYSGSTYYAASVKGRFTISRDNSRNTLYLQMNSLRPEDTAIYYCSAHGGESDVWGQGTTVTVSS

SEQ ID NO: 72 - protein, 120 aa, Artificial Sequence
  source: /note="Description of Artificial Sequence: Synthetic polypeptide"
QVQLVQSGAEVRKTGASVKVSCKASGYIFDNFGINWVRQAPGQGLEWMGWINPKNNNTNYAQKFQGRVTITADESTNTAYMEVSSLRSEDTAVYYCARGPYYYQSYMDVWGQGTMVTVSS

SEQ ID NO: 73 - protein, 123 aa, Artificial Sequence
  source: /note="Description of Artificial Sequence: Synthetic polypeptide"
QVQLQESGGGLVQPGGSLRLSCAASGFTFSSDAMTWVRQAPGKGLEWVSVISGSGGTTYYADSVKGRFTISRDNSKNTLYLQMNSLRAEDTAVYYCAKLDSSGYYYARGPRYWGQGTLVTVSS

SEQ ID NO: 74 - protein, 118 aa, Artificial Sequence
  source: /note="Description of Artificial Sequence: Synthetic polypeptide"
QVQLVQSGAEVKKPGASVKVSCKASGYTFSNYGITWVRQAPGQGLEWMGWISAYNGNTNYAQKFQGRVTMTRNTSISTAYMELSSLRSEDTAVYYCARGPYYYYMDVWGKGTMVTVSS

SEQ ID NO: 75 - protein, 115 aa, Artificial Sequence
  source: /note="Description of Artificial Sequence: Synthetic polypeptide"
EVQLLETGGGLVQPGGSLRLSCAVSGFALSNHGMSWVRRAPGKGLEWVSGIVYSGSTYYAASVKGRFTISRDNSRNTLYLQMNSLRPEDTAIYYCSAHGGESDVWGQGTTVTVSS

SEQ ID NO: 76 - protein, 115 aa, Artificial Sequence
  source: /note="Description of Artificial Sequence: Synthetic polypeptide"
EVQLVETGGGLVQPGGSLRLSCAVSGFALSNHGMSWVRRAPGKGLEWVSGIVYSGSTYYAASVKGRFTISRDNSRNTLYLQMNSLRPEDTAIYYCSAHGGESDVWGQGTTVTVSS

SEQ ID NO: 77 - protein, 115 aa, Artificial Sequence
  source: /note="Description of Artificial Sequence: Synthetic polypeptide"
EVQLVETGGGVVQPGGSLRLSCAVSGFALSNHGMSWVRRAPGKGLEWVSGIVYSGSTYYAASVKGRFTISRDNSRNTLYLQMNSLRPEDTAIYYCSAHGGESDVWGQGTTVTVSS

SEQ ID NO: 78 - protein, 117 aa, Artificial Sequence
  source: /note="Description of Artificial Sequence: Synthetic polypeptide"
QVQLVESGGGLVKPGGSLRLSCAASGFTFSDYYMSWIRQAPGKGLEWVSYISSSGSTIYYADSVKGRFTISRDNAKNSLYLQMNSLRAEDTAVYYCARESGDGMDVWGQGTTVTVSS

SEQ ID NO: 79 - protein, 115 aa, Artificial Sequence
  source: /note="Description of Artificial Sequence: Synthetic polypeptide"
EVQLVESGGGLVQPGGSLRLSCAVSGFALSNHGMSWVRRAPGKGLEWVSGIVYSGSTYYAASVKGRFTISRDNSRNTLYLQMNSLRPEDTAIYYCSAHGGESDVWGQGTTVTVSS

SEQ ID NO: 80 - protein, 117 aa, Artificial Sequence
  source: /note="Description of Artificial Sequence: Synthetic polypeptide"
QVQLVQSGGGLVKPGGSLRLSCAASGFTFSDYYMSWIRQAPGKGLEWVSYISSSGNTIYYADSVKGRFTISRDNAKNSLYLQMNSLRAEDTAVYYCARSTMVREDYWGQGTLVTVSS

SEQ ID NO: 81 - protein, 115 aa, Artificial Sequence
  source: /note="Description of Artificial Sequence: Synthetic polypeptide"
QVQLVESGGGLVQPGGSLRLSCAVSGFALSNHGMSWVRRAPGKGLEWVSGIVYSGSTYYAASVKGRFTISRDNSRNTLYLQMNSLRPEDTAIYYCSAHGGESDVWGQGTTVTVSS

SEQ ID NO: 82 - protein, 115 aa, Artificial Sequence; identical to SEQ ID NO: 76
  source: /note="Description of Artificial Sequence: Synthetic polypeptide"

SEQ ID NO: 83 - protein, 115 aa, Artificial Sequence; identical to SEQ ID NO: 79
  source: /note="Description of Artificial Sequence: Synthetic polypeptide"

SEQ ID NO: 84 - protein, 109 aa, Artificial Sequence
  source: /note="Description of Artificial Sequence: Synthetic polypeptide"
DIVLTQSPGTLSLSPGERATLSCRASQSISSSFLAWYQQKPGQAPRLLIYGASRRATGIPDRFSGSGSGTDFTLTISRLEPEDSAVYYCQQYHSSPSWTFGQGTKLEIK

SEQ ID NO: 85 - protein, 112 aa, Artificial Sequence
  source: /note="Description of Artificial Sequence: Synthetic polypeptide"
DIVMTQTPLSLPVTPGEPASISCRSSQSLLHSNGYNYLDWYLQKPGQSPQLLIYLGSNRASGVPDRFSGSGSGTDFTLKISRVEAEDVGVYYCMQALQTPYTFGQGTKVEIK

SEQ ID NO: 86 - protein, 111 aa, Artificial Sequence
  source: /note="Description of Artificial Sequence: Synthetic polypeptide"
DIVMTQTPLSLSVTPGQPASISCKSSQSLLRNDGKTPLYWYLQKAGQPPQLLIYEVSNRFSGVPDRFSGSGSGTDFTLKISRVEAEDVGAYYCMQNIQFPSFGGGTKLEIK

SEQ ID NO: 87 - protein, 112 aa, Artificial Sequence
  source: /note="Description of Artificial Sequence: Synthetic polypeptide"
DIVMTQTPLSLPVTPGEPASISCRSSQSLLHSNGYNYLNWYLQKPGQSPQLLIYLGSKRASGVPDRFSGSGSGTDFTLHITRVGAEDVGVYYCMQALQTPYTFGQGTKLEIK

SEQ ID NO: 88 - protein, 106 aa, Artificial Sequence
  source: /note="Description of Artificial Sequence: Synthetic polypeptide"
DIQLTQSPSSLSASVGDRVTITCRASQSISSYLNWYQQKPGKAPKLLIYGASTLASGVPARFSGSGSGTHFTLTINSLQSEDSATYYCQQSYKRASFGQGTKVEIK

SEQ ID NO: 89 - protein, 112 aa, Artificial Sequence
  source: /note="Description of Artificial Sequence: Synthetic polypeptide"
EIVMTQSPLSLPVTPGEPASISCRSSQSLLYSNGYNYVDWYLQKPGQSPQLLIYLGSNRASGVPDRFSGSGSGTDFKLQISRVEAEDVGIYYCMQGRQFPYSFGQGTKVEIK

SEQ ID NO: 90 - protein, 106 aa, Artificial Sequence
  source: /note="Description of Artificial Sequence: Synthetic polypeptide"
EIVLTQSPATLSVSPGESATLSCRASQSVSSNLAWYQQKPGQAPRLLIYGASTRASGIPDRFSGSGSGTDFTLTISSLQAEDVAVYYCQQYGSSLTFGGGTKVEIK

SEQ ID NO: 91 - protein, 107 aa, Artificial Sequence
  source: /note="Description of Artificial Sequence: Synthetic polypeptide"
EIVMTQSPATLSVSPGERATLSCRASQSVSSKLAWYQQKPGQAPRLLMYGASIRATGIPDRFSGSGSGTEFTLTISSLEPEDFAVYYCQQYGSSSWTFGQGTKVEIK

SEQ ID NO: 92 - protein, 109 aa, Artificial Sequence
  source: /note="Description of Artificial Sequence: Synthetic polypeptide"
EIVLTQSPGTLSLSPGERATLSCRASQSVGSTNLAWYQQKPGQAPRLLIYDASNRATGIPDRFSGGGSGTDFTLTISRLEPEDFAVYYCQQYGSSPPWTFGQGTKVEIK

SEQ ID NO: 93 - protein, 105 aa, Artificial Sequence
  source: /note="Description of Artificial Sequence: Synthetic polypeptide"
DIQMTQSPSSLSASVGDRVTITCRASQSISSYLNWYQQKPGKAPKLLIYAASSLQSGVPSRFSGSGSGTDFTLTISSLQPEDFATYYCQQSYTLAFGQGTKVDIK

SEQ ID NO: 94 - protein, 107 aa, Artificial Sequence
  source: /note="Description of Artificial Sequence: Synthetic polypeptide"
DIQLTQSPSSLSASVGDRVTITCRASQSISSYLNWYQQKPGKAPKLLIYAASSLQSGVPSRFSGSGSGTDFTLTISSLQPEDFATYYCQQSYSTPYTFGQGTKVEIK

SEQ ID NO: 95 - protein, 112 aa, Artificial Sequence
  source: /note="Description of Artificial Sequence: Synthetic polypeptide"
DIVLTQSPLSLPVTLGQPASISCKSSESLVHNSGKTYLNWFHQRPGQSPRRLIYEVSNRDSGVPDRFTGSGSGTDFTLKISRVEAEDVGVYYCMQGTHWPGTFGQGTKLEIK

SEQ ID NO: 96 - protein, 107 aa, Artificial Sequence
  source: /note="Description of Artificial Sequence: Synthetic polypeptide"
DIRLTQSPSPLSASVGDRVTITCQASEDINKFLNWYHQTPGKAPKLLIYDASTLQTGVPSRFSGSGSGTDFTLTINSLQPEDIGTYYCQQYESLPLTFGGGTKVEIK

SEQ ID NO: 97 - protein, 108 aa, Artificial Sequence
  source: /note="Description of Artificial Sequence: Synthetic polypeptide"
ETTLTQSPATLSVSPGERATLSCRASQSVGSNLAWYQQKPGQGPRLLIYGASTRATGIPARFSGSGSGTEFTLTISSLQPEDFAVYYCQQYNDWLPVTFGQGTKVEIK

SEQ ID NO: 98 - protein, 109 aa, Artificial Sequence
  source: /note="Description of Artificial Sequence: Synthetic polypeptide"
EIVLTQSPGTLSLSPGERATLSCRASQSIGSSSLAWYQQKPGQAPRLLMYGASSRASGIPDRFSGSGSGTDFTLTISRLEPEDFAVYYCQQYAGSPPFTFGQGTKVEIK

SEQ ID NO: 99 - protein, 490 aa, Artificial Sequence
  source: /note="Description of Artificial Sequence: Synthetic polypeptide"
MALPVTALLLPLALLLHAARPQVQLVESGGGLVQPGRSLRLSCAASGFTFSNYAMSWVRQAPGKGLGWVSGISRSGENTYYADSVKGRFTISRDNSKNTLYLQMNSLRDEDTAVYYCARSPAHYYGGMDVWGQGTTVTVSSASGGGGSGGRASGGGGSDIVLTQSPGTLSLSPGERATLSCRASQSISSSFLAWYQQKPGQAPRLLIYGASRRATGIPDRFSGSGSGTDFTLTISRLEPEDSAVYYCQQYHSSPSWTFGQGTKLEIKTTTPAPRPPTPAPTIASQPLSLRPEACRPAAGGAVHTRGLDFACDIYIWAPLAGTCGVLLLSLVITLYCKRGRKKLLYIFKQPFMRPVQTTQEEDGCSCRFPEEEEGGCELRVKFSRSADAPAYKQGQNQLYNELNLGRREEYDVLDKRRGRDPEMGGKPRRKNPQEGLYNELQKDKMAEAYSEIGMKGERRRGKGHDGLYQGLSTATKDTYDALHMQALPPR

SEQ ID NO: 100 - protein, 488 aa, Artificial Sequence
  source: /note="Description of Artificial Sequence: Synthetic polypeptide"
MALPVTALLLPLALLLHAARPQVQLVESGGGLVQPGRSLRLSCAASGFTFDDYAMHWVRQAPGKGLEWVSGISWNSGSIGYADSVKGRFTISRDNAKNSLYLQMNSLRAEDTALYYCSVHSFLAYWGQGTLVTVSSASGGGGSGGRASGGGGSDIVMTQTPLSLPVTPGEPASISCRSSQSLLHSNGYNYLDWYLQKPGQSPQLLIYLGSNRASGVPDRFSGSGSGTDFTLKISRVEAEDVGVYYCMQALQTPYTFGQGTKVEIKTTTPAPRPPTPAPTIASQPLSLRPEACRPAAGGAVHTRGLDFACDIYIWAPLAGTCGVLLLSLVITLYCKRGRKKLLYIFKQPFMRPVQTTQEEDGCSCRFPEEEEGGCELRVKFSRSADAPAYKQGQNQLYNELNLGRREEYDVLDKRRGRDPEMGGKPRRKNPQEGLYNELQKDKMAEAYSEIGMKGERRRGKGHDGLYQGLSTATKDTYDALHMQALPPR

SEQ ID NO: 101 - protein, 487 aa, Artificial Sequence
  source: /note="Description of Artificial Sequence: Synthetic polypeptide"
MALPVTALLLPLALLLHAARPEVQLLESGGGLVQPGGSLRLSCAVSGFALSNHGMSWVRRAPGKGLEWVSGIVYSGSTYYAASVKGRFTISRDNSRNTLYLQMNSLRPEDTAIYYCSAHGGESDVWGQGTTVTVSSASGGGGSGGRASGGGGSDIVMTQTPLSLSVTPGQPASISCKSSQSLLRNDGKTPLYWYLQKAGQPPQLLIYEVSNRFSGVPDRFSGSGSGTDFTLKISRVEAEDVGAYYCMQNIQFPSFGGGTKLEIKTTTPAPRPPTPAPTIASQPLSLRPEACRPAAGGAVHTRGLDFACDIYIWAPLAGTCGVLLLSLVITLYCKRGRKKLLYIFKQPFMRPVQTTQEEDGCSCRFPEEEEGGCELRVKFSRSADAPAYKQGQNQLYNELNLGRREEYDVLDKRRGRDPEMGGKPRRKNPQEGLYNELQKDKMAEAYSEIGMKGERRRGKGHDGLYQGLSTATKDTYDALHMQALPPR

SEQ ID NO: 102 - protein, 493 aa, Artificial Sequence
  source: /note="Description of Artificial Sequence: Synthetic polypeptide"
MALPVTALLLPLALLLHAARPQVQLVQSGAEVRKTGASVKVSCKASGYIFDNFGINWVRQAPGQGLEWMGWINPKNNNTNYAQKFQGRVTITADESTNTAYMEVSSLRSEDTAVYYCARGPYYYQSYMDVWGQGTMVTVSSASGGGGSGGRASGGGGSDIVMTQTPLSLPVTPGEPASISCRSSQSLLHSNGYNYLNWYLQKPGQSPQLLIYLGSKRASGVPDRFSGSGSGTDFTLHITRVGAEDVGVYYCMQALQTPYTFGQGTKLEIKTTTPAPRPPTPAPTIASQPLSLRPEACRPAAGGAVHTRGLDFACDIYIWAPLAGTCGVLLLSLVITLYCKRGRKKLLYIFKQPFMRPVQTTQEEDGCSCRFPEEEEGGCELRVKFSRSADAPAYKQGQNQLYNELNLGRREEYDVLDKRRGRDPEMGGKPRRKNPQEGLYNELQKDKMAEAYSEIGMKGERRRGKGHDGLYQGLSTATKDTYDALHMQALPPR

SEQ ID NO: 103 - protein, 490 aa, Artificial Sequence
  source: /note="Description of Artificial Sequence: Synthetic polypeptide"
MALPVTALLLPLALLLHAARPQVQLQESGGGLVQPGGSLRLSCAASGFTFSSDAMTWVRQAPGKGLEWVSVISGSGGTTYYADSVKGRFTISRDNSKNTLYLQMNSLRAEDTAVYYCAKLDSSGYYYARGPRYWGQGTLVTVSSASGGGGSGGRASGGGGSDIQLTQSPSSLSASVGDRVTITCRASQSISSYLNWYQQKPGKAPKLLIYGASTLASGVPARFSGSGSGTHFTLTINSLQSEDSATYYCQQSYKRASFGQGTKVEIKTTTPAPRPPTPAPTIASQPLSLRPEACRPAAGGAVHTRGLDFACDIYIWAPLAGTCGVLLLSLVITLYCKRGRKKLLYIFKQPFMRPVQTTQEEDGCSCRFPEEEEGGCELRVKFSRSADAPAYKQGQNQLYNELNLGRREEYDVLDKRRGRDPEMGGKPRRKNPQEGLYNELQKDKMAEAYSEIGMKGERRRGKGHDGLYQGLSTATKDTYDALHMQALPPR

SEQ ID NO: 104 - protein, 491 aa, Artificial Sequence
  source: /note="Description of Artificial Sequence: Synthetic polypeptide"
MALPVTALLLPLALLLHAARPQVQLVQSGAEVKKPGASVKVSCKASGYTFSNYGITWVRQAPGQGLEWMGWISAYNGNTNYAQKFQGRVTMTRNTSISTAYMELSSLRSEDTAVYYCARGPYYYYMDVWGKGTMVTVSSASGGGGSGGRASGGGGSEIVMTQSPLSLPVTPGEPASISCRSSQSLLYSNGYNYVDWYLQKPGQSPQLLIYLGSNRASGVPDRFSGSGSGTDFKLQISRVEAEDVGIYYCMQGRQFPYSFGQGTKVEIKTTTPAPRPPTPAPTIASQPLSLRPEACRPAAGGAVHTRGLDFACDIYIWAPLAGTCGVLLLSLVITLYCKRGRKKLLYIFKQPFMRPVQTTQEEDGCSCRFPEEEEGGCELRVKFSRSADAPAYKQGQNQLYNELNLGRREEYDVLDKRRGRDPEMGGKPRRKNPQEGLYNELQKDKMAEAYSEIGMKGERRRGKGHDGLYQGLSTATKDTYDALHMQALPPR

SEQ ID NO: 105 - protein, 482 aa, Artificial Sequence
  source: /note="Description of Artificial Sequence: Synthetic polypeptide"
MALPVTALLLPLALLLHAARPEVQLLETGGGLVQPGGSLRLSCAVSGFALSNHGMSWVRRAPGKGLEWVSGIVYSGSTYYAASVKGRFTISRDNSRNTLYLQMNSLRPEDTAIYYCSAHGGESDVWGQGTTVTVSSASGGGGSGGRASGGGGSEIVLTQSPATLSVSPGESATLSCRASQSVSSNLAWYQQKPGQAPRLLIYGASTRASGIPDRFSGSGSGTDFTLTISSLQAEDVAVYYCQQYGSSLTFGGGTKVEIKTTTPAPRPPTPAPTIASQPLSLRPEACRPAAGGAVHTRGLDFACDIYIWAPLAGTCGVLLLSLVITLYCKRGRKKLLYIFKQPFMRPVQTTQEEDGCSCRFPEEEEGGCELRVKFSRSADAPAYKQGQNQLYNELNLGRREEYDVLDKRRGRDPEMGGKPRRKNPQEGLYNELQKDKMAEAYSEIGMKGERRRGKGHDGLYQGLSTATKDTYDALHMQALPPR

SEQ ID NO: 106 - protein, 483 aa, Artificial Sequence
  source: /note="Description of Artificial Sequence: Synthetic polypeptide"
MALPVTALLLPLALLLHAARPEVQLVETGGGLVQPGGSLRLSCAVSGFALSNHGMSWVRRAPGKGLEWVSGIVYSGSTYYAASVKGRFTISRDNSRNTLYLQMNSLRPEDTAIYYCSAHGGESDVWGQGTTVTVSSASGGGGSGGRASGGGGSEIVMTQSPATLSVSPGERATLSCRASQSVSSKLAWYQQKPGQAPRLLMYGASIRATGIPDRFSGSGSGTEFTLTISSLEPEDFAVYYCQQYGSSSWTFGQGTKVEIKTTTPAPRPPTPAPTIASQPLSLRPEACRPAAGGAVHTRGLDFACDIYIWAPLAGTCGVLLLSLVITLYCKRGRKKLLYIFKQPFMRPVQTTQEEDGCSCRFPEEEEGGCELRVKFSRSADAPAYKQGQNQLYNELNLGRREEYDVLDKRRGRDPEMGGKPRRKNPQEGLYNELQKDKMAEAYSEIGMKGERRRGKGHDGLYQGLSTATKDTYDALHMQALPPR

SEQ ID NO: 107 - protein, 485 aa, Artificial Sequence
  source: /note="Description of Artificial Sequence: Synthetic polypeptide"
MALPVTALLLPLALLLHAARPEVQLVETGGGVVQPGGSLRLSCAVSGFALSNHGMSWVRRAPGKGLEWVSGIVYSGSTYYAASVKGRFTISRDNSRNTLYLQMNSLRPEDTAIYYCSAHGGESDVWGQGTTVTVSSASGGGGSGGRASGGGGSEIVLTQSPGTLSLSPGERATLSCRASQSVGSTNLAWYQQKPGQAPRLLIYDASNRATGIPDRFSGGGSGTDFTLTISRLEPEDFAVYYCQQYGSSPPWTFGQGTKVEIKTTTPAPRPPTPAPTIASQPLSLRPEACRPAAGGAVHTRGLDFACDIYIWAPLAGTCGVLLLSLVITLYCKRGRKKLLYIFKQPFMRPVQTTQEEDGCSCRFPEEEEGGCELRVKFSRSADAPAYKQGQNQLYNELNLGRREEYDVLDKRRGRDPEMGGKPRRKNPQEGLYNELQKDKMAEAYSEIGMKGERRRGKGHDGLYQGLSTATKDTYDALHMQALPPR

SEQ ID NO: 108 - protein, 483 aa, Artificial Sequence
  source: /note="Description of Artificial Sequence: Synthetic polypeptide"
MALPVTALLLPLALLLHAARPQVQLVESGGGLVKPGGSLRLSCAASGFTFSDYYMSWIRQAPGKGLEWVSYISSSGSTIYYADSVKGRFTISRDNAKNSLYLQMNSLRAEDTAVYYCARESGDGMDVWGQGTTVTVSSASGGGGSGGRASGGGGSDIQMTQSPSSLSASVGDRVTITCRASQSISSYLNWYQQKPGKAPKLLIYAASSLQSGVPSRFSGSGSGTDFTLTISSLQPEDFATYYCQQSYTLAFGQGTKVDIKTTTPAPRPPTPAPTIASQPLSLRPEACRPAAGGAVHTRGLDFACDIYIWAPLAGTCGVLLLSLVITLYCKRGRKKLLYIFKQPFMRPVQTTQEEDGCSCRFPEEEEGGCELRVKFSRSADAPAYKQGQNQLYNELNLGRREEYDVLDKRRGRDPEMGGKPRRKNPQEGLYNELQKDKMAEAYSEIGMKGERRRGKGHDGLYQGLSTATKDTYDALHMQALPPR

SEQ ID NO: 109 - protein, 483 aa, Artificial Sequence
  source: /note="Description of Artificial Sequence: Synthetic polypeptide"
MALPVTALLLPLALLLHAARPEVQLVESGGGLVQPGGSLRLSCAVSGFALSNHGMSWVRRAPGKGLEWVSGIVYSGSTYYAASVKGRFTISRDNSRNTLYLQMNSLRPEDTAIYYCSAHGGESDVWGQGTTVTVSSASGGGGSGGRASGGGGSDIQLTQSPSSLSASVGDRVTITCRASQSISSYLNWYQQKPGKAPKLLIYAASSLQSGVPSRFSGSGSGTDFTLTISSLQPEDFATYYCQQSYSTPYTFGQGTKVEIKTTTPAPRPPTPAPTIASQPLSLRPEACRPAAGGAVHTRGLDFACDIYIWAPLAGTCGVLLLSLVITLYCKRGRKKLLYIFKQPFMRPVQTTQEEDGCSCRFPEEEEGGCELRVKFSRSADAPAYKQGQNQLYNELNLGRREEYDVLDKRRGRDPEMGGKPRRKNPQEGLYNELQKDKMAEAYSEIGMKGERRRGKGHDGLYQGLSTATKDTYDALHMQALPPR

SEQ ID NO: 110 - protein, 490 aa, Artificial Sequence
  source: /note="Description of Artificial Sequence: Synthetic polypeptide"
MALPVTALLLPLALLLHAARPQVQLVQSGGGLVKPGGSLRLSCAASGFTFSDYYMSWIRQAPGKGLEWVSYISSSGNTIYYADSVKGRFTISRDNAKNSLYLQMNSLRAEDTAVYYCARSTMVREDYWGQGTLVTVSSASGGGGSGGRASGGGGSDIVLTQSPLSLPVTLGQPASISCKSSESLVHNSGKTYLNWFHQRPGQSPRRLIYEVSNRDSGVPDRFTGSGSGTDFTLKISRVEAEDVGVYYCMQGTHWPGTFGQGTKLEIKTTTPAPRPPTPAPTIASQPLSLRPEACRPAAGGAVHTRGLDFACDIYIWAPLAGTCGVLLLSLVITLYCKRGRKKLLYIFKQPFMRPVQTTQEEDGCSCRFPEEEEGGCELRVKFSRSADAPAYKQGQNQLYNELNLGRREEYDVLDKRRGRDPEMGGKPRRKNPQEGLYNELQKDKMAEAYSEIGMKGERRRGKGHDGLYQGLSTATKDTYDALHMQALPPR

SEQ ID NO: 111 - protein, 483 aa, Artificial Sequence
  source: /note="Description of Artificial Sequence: Synthetic polypeptide"
MALPVTALLLPLALLLHAARPQVQLVESGGGLVQPGGSLRLSCAVSGFALSNHGMSWVRRAPGKGLEWVSGIVYSGSTYYAASVKGRFTISRDNSRNTLYLQMNSLRPEDTAIYYCSAHGGESDVWGQGTTVTVSSASGGGGSGGRASGGGGSDIRLTQSPSPLSASVGDRVTITCQASEDINKFLNWYHQTPGKAPKLLIYDASTLQTGVPSRFSGSGSGTDFTLTINSLQPEDIGTYYCQQYESLPLTFGGGTKVEIKTTTPAPRPPTPAPTIASQPLSLRPEACRPAAGGAVHTRGLDFACDIYIWAPLAGTCGVLLLSLVITLYCKRGRKKLLYIFKQPFMRPVQTTQEEDGCSCRFPEEEEGGCELRVKFSRSADAPAYKQGQNQLYNELNLGRREEYDVLDKRRGRDPEMGGKPRRKNPQEGLYNELQKDKMAEAYSEIGMKGERRRGKGHDGLYQGLSTATKDTYDALHMQALPPR

SEQ ID NO: 112 - protein, 484 aa, Artificial Sequence
  source: /note="Description of Artificial Sequence: Synthetic polypeptide"
MALPVTALLLPLALLLHAARPEVQLVETGGGLVQPGGSLRLSCAVSGFALSNHGMSWVRRAPGKGLEWVSGIVYSGSTYYAASVKGRFTISRDNSRNTLYLQMNSLRPEDTAIYYCSAHGGESDVWGQGTTVTVSSASGGGGSGGRASGGGGSETTLTQSPATLSVSPGERATLSCRASQSVGSNLAWYQQKPGQGPRLLIYGASTRATGIPARFSGSGSGTEFTLTISSLQPEDFAVYYCQQYNDWLPVTFGQGTKVEIKTTTPAPRPPTPAPTIASQPLSLRPEACRPAAGGAVHTRGLDFACDIYIWAPLAGTCGVLLLSLVITLYCKRGRKKLLYIFKQPFMRPVQTTQEEDGCSCRFPEEEEGGCELRVKFSRSADAPAYKQGQNQLYNELNLGRREEYDVLDKRRGRDPEMGGKPRRKNPQEGLYNELQKDKMAEAYSEIGMKGERRRGKGHDGLYQGLSTATKDTYDALHMQALPPR

SEQ ID NO: 113 - protein, 485 aa, Artificial Sequence
  source: /note="Description of Artificial Sequence: Synthetic polypeptide"
MALPVTALLLPLALLLHAARPEVQLVESGGGLVQPGGSLRLSCAVSGFALSNHGMSWVRRAPGKGLEWVSGIVYSGSTYYAASVKGRFTISRDNSRNTLYLQMNSLRPEDTAIYYCSAHGGESDVWGQGTTVTVSSASGGGGSGGRASGGGGSEIVLTQSPGTLSLSPGERATLSCRASQSIGSSSLAWYQQKPGQAPRLLMYGASSRASGIPDRFSGSGSGTDFTLTISRLEPEDFAVYYCQQYAGSPPFTFGQGTKVEIKTTTPAPRPPTPAPTIASQPLSLRPEACRPAAGGAVHTRGLDFACDIYIWAPLAGTCGVLLLSLVITLYCKRGRKKLLYIFKQPFMRPVQTTQEEDGCSCRFPEEEEGGCELRVKFSRSADAPAYKQGQNQLYNELNLGRREEYDVLDKRRGRDPEMGGKPRRKNPQEGLYNELQKDKMAEAYSEIGMKGERRRGKGHDGLYQGLSTATKDTYDALHMQALPPR

SEQ ID NO: 114 - DNA, 1470 bp, Artificial Sequence
  source: /note="Description of Artificial Sequence: Synthetic polynucleotide"
atggccctccctgtcaccgccctgctgcttccgctggctcttctgctccacgccgctcggccccaagtgcaactcgtggaatctggtggaggactcgtgcaacccggaagatcgcttagactgtcgtgtgccgccagcgggttcactttctcgaactacgcgatgtcctgggtccgccaggcacccggaaagggactcggttgggtgtccggcatttcccggtccggcgaaaatacctactacgccgactccgtgaagggccgcttcaccatctcaagggacaacagcaaaaacaccctgtacttgcaaatgaactccctgcgggatgaagatacagccgtgtactattgcgcccggtcgcctgcccattactacggcggaatggacgtctggggacagggaaccactgtgactgtcagcagcgcgtcgggtggcggcggctcagggggtcgggcctccggggggggagggtccgacatcgtgctgacccagtccccgggaaccctgagcctgagcccgggagagcgcgcgaccctgtcatgccgggcatcccagagcattagctcctcctttctcgcctggtatcagcagaagcccggacaggccccgaggctgctgatctacggcgctagcagaagggctaccggaatcccagaccggttctccggctccggttccgggaccgatttcacccttactatctcgcgcctggaacctgaggactccgccgtctactactgccagcagtaccactcatccccgtcgtggacgttcggacagggcaccaagctggagattaagaccactaccccagcaccgaggccacccaccccggctcctaccatcgcctcccagcctctgtccctgcgtccggaggcatgtagacccgcagctggtggggccgtgcatacccggggtcttgacttcgcctgcgatatctacatttgggcccctctggctggtacttgcggggtcctgctgctttcactcgtgatcactctttactgtaagcgcggtcggaagaagctgctgtacatctttaagcaacccttcatgaggcctgtgcagactactcaagaggaggacggctgttcatgccggttcccagaggaggaggaaggcggctgcgaactgcgcgtgaaattcagccgcagcgcagatgctccagcctacaagcaggggcagaaccagctctacaacgaactcaatcttggtcggagagaggagtacgacgtgctggacaagcggagaggacgggacccagaaatgggcgggaagccgcgcagaaagaatccccaagagggcctgtacaacgagctccaaaaggataagatggcagaagcctatagcgagattggtatgaaaggggaacgcagaagaggcaaaggccacgacggactgtaccagggactcagcaccgccaccaaggacacctatgacgctcttcacatgcaggccctgccgcctcgg

SEQ ID NO: 115 - DNA, 1464 bp, Artificial Sequence
  source: /note="Description of Artificial Sequence: Synthetic polynucleotide"
atggccctccctgtcaccgccctgctgcttccgctggctcttctgctccacgccgctcggccccaagtgcaactcgtcgaatccggtggaggtctggtccaacctggtagaagcctgagactgtcgtgtgcggccagcggattcacctttgatgactatgctatgcactgggtgcggcaggccccaggaaagggcctggaatgggtgtcgggaattagctggaactccgggtccattggctacgccgactccgtgaagggccgcttcaccatctcccgcgacaacgcaaagaactccctgtacttgcaaatgaactcgctcagggctgaggataccgcgctgtactactgctccgtgcattccttcctggcctactggggacagggaactctggtcaccgtgtcgagcgcctccggcggcgggggctcgggtggacgggcctcgggcggaggggggtccgacatcgtgatgacccagaccccgctgagcttgcccgtgactcccggagagcctgcatccatctcctgccggtcatcccagtcccttctccactccaacggatacaactacctcgactggtacctccagaagccgggacagagccctcagcttctgatctacctggggtcaaatagagcctcaggagtgccggatcggttcagcggatctggttcgggaactgatttcactctgaagatttcccgcgtggaagccgaggacgtgggcgtctactactgtatgcaggcgctgcagaccccctataccttcggccaagggacgaaagtggagatcaagaccactaccccagcaccgaggccacccaccccggctcctaccatcgcctcccagcctctgtccctgcgtccggaggcatgtagacccgcagctggtggggccgtgcatacccggggtcttgacttcgcctgcgatatctacatttgggcccctctggctggtacttgcggggtcctgctgctttcactcgtgatcactctttactgtaagcgcggtcggaagaagctgctgtacatctttaagcaacccttcatgaggcctgtgcagactactcaagaggaggacggctgttcatgccggttcccagaggaggaggaaggcggctgcgaactgcgcgtgaaattcagccgcagcgcagatgctccagcctacaagcaggggcagaaccagctctacaacgaactcaatcttggtcggagagaggagtacgacgtgctggacaagcggagaggacgggacccagaaatgggcgggaagccgcgcagaaagaatccccaagagggcctgtacaacgagctccaaaaggataagatggcagaagcctatagcgagattggtatgaaaggggaacgcagaagaggcaaaggccacgacggactgtaccagggactcagcaccgccaccaaggacacctatgacgctcttcacatgcaggccctgccgcctcgg

SEQ ID NO: 116 - DNA, 1461 bp, Artificial Sequence
  source: /note="Description of Artificial Sequence: Synthetic polynucleotide"
atggccctccctgtcaccgccctgctgcttccgctggctcttctgctccacgccgctcggcccgaagtgcaattgttggaatctggaggaggacttgtgcagcctggaggatcactgagactttcgtgtgcggtgtcaggcttcgccctgagcaaccacggcatgagctgggtgcggagagccccggggaagggtctggaatgggtgtccgggatcgtctactccggttcaacttactacgccgcaagcgtgaagggtcgcttcaccatttcccgcgataactcccggaacaccctgtacctccaaatgaactccctgcggcccgaggacaccgccatctactactgttccgcgcatggaggagagtccgatgtctggggacagggcactaccgtgaccgtgtcgagcgcctcggggggaggaggctccggcggtcgcgcctccggggggggtggcagcgacattgtgatgacgcagactccactctcgctgtccgtgaccccgggacagcccgcgtccatctcgtgcaagagctcccagagcctgctgaggaacgacggaaagactcctctgtattggtacctccagaaggctggacagcccccgcaactgctcatctacgaagtgtcaaatcgcttctccggggtgccggatcggttttccggctcgggatcgggcaccgacttcaccctgaaaatctccagggtcgaggccgaggacgtgggagcctactactgcatgcaaaacatccagttcccttccttcggcggcggcacaaagctggagattaagaccactaccccagcaccgaggccacccaccccggctcctaccatcgcctcccagcctctgtccctgcgtccggaggcatgtagacccgcagctggtggggccgtgcatacccggggtcttgacttcgcctgcgatatctacatttgggcccctctggctggtacttgcggggtcctgctgctttcactcgtgatcactctttactgtaagcgcggtcggaagaagctgctgtacatctttaagcaacccttcatgaggcctgtgcagactactcaagaggaggacggctgttcatgccggttcccagaggaggaggaaggcggctgcgaactgcgcgtgaaattcagccgcagcgcagatgctccagcctacaagcaggggcagaaccagctctacaacgaactcaatcttggtcggagagaggagtacgacgtgctggacaagcggagaggacgggacccagaaatgggcgggaagccgcgcagaaagaatccccaagagggcctgtacaacgagctccaaaaggataagatggcagaagcctatagcgagattggtatgaaaggggaacgcagaagaggcaaaggccacgacggactgtaccagggactcagcaccgccaccaaggacacctatgacgctcttcacatgcaggccctgccgcctcgg

SEQ ID NO: 117 - DNA, 1479 bp, Artificial Sequence
  source: /note="Description of Artificial Sequence: Synthetic polynucleotide"
atggccctccctgtcaccgccctgctgcttccgctggctcttctgctccacgccgctcggccccaagtccaactcgtccagtccggcgcagaagtcagaaaaaccggtgctagcgtgaaagtgtcctgcaaggcctccggctacattttcgataacttcggaatcaactgggtcagacaggccccgggccaggggctggaatggatgggatggatcaaccccaagaacaacaacaccaactacgcacagaagttccagggccgcgtgactatcaccgccgatgaatcgaccaataccgcctacatggaggtgtcctccctgcggtcggaggacactgccgtgtattactgcgcgaggggcccatactactaccaaagctacatggacgtctggggacagggaaccatggtgaccgtgtcatccgcctccggtggtggaggctccggggggcgggcttcaggaggcggaggaagcgatattgtgatgacccagactccgcttagcctgcccgtgactcctggagaaccggcctccatttcctgccggtcctcgcaatcactcctgcattccaacggttacaactacctgaattggtacctccagaagcctggccagtcgccccagttgctgatctatctgggctcgaagcgcgcctccggggtgcctgaccggtttagcggatctgggagcggcacggacttcactctccacatcacccgcgtgggagcggaggacgtgggagtgtactactgtatgcaggcgctgcagactccgtacacattcggacagggcaccaagctggagatcaagaccactaccccagcaccgaggccacccaccccggctcctaccatcgcctcccagcctctgtccctgcgtccggaggcatgtagacccgcagctggtggggccgtgcatacccggggtcttgacttcgcctgcgatatctacatttgggcccctctggctggtacttgcggggtcctgctgctttcactcgtgatcactctttactgtaagcgcggtcggaagaagctgctgtacatctttaagcaacccttcatgaggcctgtgcagactactcaagaggaggacggctgttcatgccggttcccagaggaggaggaaggcggctgcgaactgcgcgtgaaattcagccgcagcgcagatgctccagcctacaagcaggggcagaaccagctctacaacgaactcaatcttggtcggagagaggagtacgacgtgctggacaagcggagaggacgggacccagaaatgggcgggaagccgcgcagaaagaatccccaagagggcctgtacaacgagctccaaaaggataagatggcagaagcctatagcgagattggtatgaaaggggaacgcagaagaggcaaaggccacgacggactgtaccagggactcagcaccgccaccaaggacacctatgacgctcttcacatgcaggccctgccgcctcgg

SEQ ID NO: 118 - DNA, 1470 bp, Artificial Sequence
  source: /note="Description of Artificial Sequence: Synthetic polynucleotide"
atggccctccctgtcaccgccctgctgcttccgctggctcttctgctccacgccgctcggccccaagtgcaacttcaagaatcaggcggaggactcgtgcagcccggaggatcattgcggctctcgtgcgccgcctcgggcttcaccttctcgagcgacgccatgacctgggtccgccaggccccggggaaggggctggaatgggtgtctgtgatttccggctccgggggaactacgtactacgccgattccgtgaaaggtcgcttcactatctcccgggacaacagcaagaacaccctttatctgcaaatgaattccctccgcgccgaggacaccgccgtgtactactgcgccaagctggactcctcgggctactactatgcccggggtccgagatactggggacagggaaccctcgtgaccgtgtcctccgcgtccggcggaggagggtcgggagggcgggcctccggcggcggcggttcggacatccagctgacccagtccccatcctcactgagcgcaagcgtgggcgacagagtcaccattacatgcagggcgtcccagagcatcagctcctacctgaactggtaccaacagaagcctggaaaggctcctaagctgttgatctacggggcttcgaccctggcatccggggtgcccgcgaggtttagcggaagcggtagcggcactcacttcactctgaccattaacagcctccagtccgaggattcagccacttactactgtcagcagtcctacaagcgggccagcttcggacagggcactaaggtcgagatcaagaccactaccccagcaccgaggccacccaccccggctcctaccatcgcctcccagcctctgtccctgcgtccggaggcatgtagacccgcagctggtggggccgtgcatacccggggtcttgacttcgcctgcgatatctacatttgggcccctctggctggtacttgcggggtcctgctgctttcactcgtgatcactctttactgtaagcgcggtcggaagaagctgctgtacatctttaagcaacccttcatgaggcctgtgcagactactcaagaggaggacggctgttcatgccggttcccagaggaggaggaaggcggctgcgaactgcgcgtgaaattcagccgcagcgcagatgctccagcctacaagcaggggcagaaccagctctacaacgaactcaatcttggtcggagagaggagtacgacgtgctggacaagcggagaggacgggacccagaaatgggcgggaagccgcgcagaaagaatccccaagagggcctgtacaacgagctccaaaaggataagatggcagaagcctatagcgagattggtatgaaaggggaacgcagaagaggcaaaggccacgacggactgtaccagggactcagcaccgccaccaaggacacctatgacgctcttcacatgcaggccctgccgcctcgg

SEQ ID NO: 119 - DNA, 1473 bp, Artificial Sequence
  source: /note="Description of Artificial Sequence: Synthetic polynucleotide"
atggccctccctgtcaccgccctgctgcttccgctggctcttctgctccacgccgctcggccccaagtccaactggtccagagcggtgcagaagtgaagaagcccggagcgagcgtgaaagtgtcctgcaaggcttccgggtacaccttctccaactacggcatcacttgggtgcgccaggccccgggacagggcctggaatggatggggtggatttccgcgtacaacggcaatacgaactacgctcagaagttccagggtagagtgaccatgactaggaacacctccatttccaccgcctacatggaactgtcctccctgcggagcgaggacaccgccgtgtactattgcgcccggggaccatactactactacatggatgtctgggggaaggggactatggtcaccgtgtcatccgcctcgggaggcggcggatcaggaggacgcgcctctggtggtggaggatcggagatcgtgatgacccagagccctctctccttgcccgtgactcctggggagcccgcatccatttcatgccggagctcccagtcacttctctactccaacggctataactacgtggattggtacctccaaaagccgggccagagcccgcagctgctgatctacctgggctcgaacagggccagcggagtgcctgaccggttctccgggtcgggaagcgggaccgacttcaagctgcaaatctcgagagtggaggccgaggacgtgggaatctactactgtatgcagggccgccagtttccgtactcgttcggacagggcaccaaagtggaaatcaagaccactaccccagcaccgaggccacccaccccggctcctaccatcgcctcccagcctctgtccctgcgtccggaggcatgtagacccgcagctggtggggccgtgcatacccggggtcttgacttcgcctgcgatatctacatttgggcccctctggctggtacttgcggggtcctgctgctttcactcgtgatcactctttactgtaagcgcggtcggaagaagctgctgtacatctttaagcaacccttcatgaggcctgtgcagactactcaagaggaggacggctgttcatgccggttcccagaggaggaggaaggcggctgcgaactgcgcgtgaaattcagccgcagcgcagatgctccagcctacaagcaggggcagaaccagctctacaacgaactcaatcttggtcggagagaggagtacgacgtgctggacaagcggagaggacgggacccagaaatgggcgggaagccgcgcagaaagaatccccaagagggcctgtacaacgagctccaaaaggataagatggcagaagcctatagcgagattggtatgaaaggggaacgcagaagaggcaaaggccacgacggactgtaccagggactcagcaccgccaccaaggacacctatgacgctcttcacatgcaggccctgccgcctcgg

SEQ ID NO: 120 - DNA, 1446 bp, Artificial Sequence
  source: /note="Description of Artificial Sequence: Synthetic polynucleotide"
atggccctccctgtcaccgccctgctgcttccgctggctcttctgctccacgccgctcggcccgaagtgcaattgctcgaaactggaggaggtctggtgcaacctggaggatcacttcgcctgtcctgcgccgtgtcgggctttgccctgtccaaccatggaatgagctgggtccgccgcgcgccggggaagggcctcgaatgggtgtccggcatcgtctactccggctccacctactacgccgcgtccgtgaagggccggttcacgatttcacgggacaactcgcggaacaccctgtacctccaaatgaattcccttcggccggaggatactgccatctactactgctccgcccacggtggcgaatccgacgtctggggccagggaaccaccgtgaccgtgtccagcgcgtccgggggaggaggaagcgggggtagagcatcgggtggaggcggatcagagatcgtgctgacccagtcccccgccaccttgagcgtgtcaccaggagagtccgccaccctgtcatgccgcgccagccagtccgtgtcctccaacctggcttggtaccagcagaagccggggcaggcccctagactcctgatctatggggcgtcgacccgggcatctggaattcccgataggttcagcggatcgggctcgggcactgacttcactctgaccatctcctcgctgcaagccgaggacgtggctgtgtactactgtcagcagtacggaagctccctgactttcggtggcgggaccaaagtcgagattaagaccactaccccagcaccgaggccacccaccccggctcctaccatcgcctcccagcctctgtccctgcgtccggaggcatgtagacccgcagctggtggggccgtgcatacccggggtcttgacttcgcctgcgatatctacatttgggcccctctggctggtacttgcggggtcctgctgctttcactcgtgatcactctttactgtaagcgcggtcggaagaagctgctgtacatctttaagcaacccttcatgaggcctgtgcagactactcaagaggaggacggctgttcatgccggttcccagaggaggaggaaggcggctgcgaactgcgcgtgaaattcagccgcagcgcagatgctccagcctacaagcaggggcagaaccagctctacaacgaactcaatcttggtcggagagaggagtacgacgtgctggacaagcggagaggacgggacccagaaatgggcgggaagccgcgcagaaagaatccccaagagggcctgtacaacgagctccaaaaggataagatggcagaagcctatagcgagattggtatgaaaggggaacgcagaagaggcaaaggccacgacggactgtaccagggactcagcaccgccaccaaggacacctatgacgctcttcacatgcaggccctgccgcctcgg

SEQ ID NO: 121 - DNA, 1449 bp, Artificial Sequence
  source: /note="Description of Artificial Sequence: Synthetic polynucleotide"
atggccctccctgtcaccgccctgctgcttccgctggctcttctgctccacgccgctcggcccgaagtgcaattggtggaaactggaggaggacttgtgcaacctggaggatcattgagactgagctgcgcagtgtcgggattcgccctgagcaaccatggaatgtcctgggtcagaagggcccctggaaaaggcctcgaatgggtgtcagggatcgtgtactccggttccacttactacgccgcctccgtgaaggggcgcttcactatctcacgggataactcccgcaataccctgtacctccaaatgaacagcctgcggccggaggataccgccatctactactgttccgcccacggtggagagtctgacgtctggggccagggaactaccgtgaccgtgtcctccgcgtccggcggtggagggagcggcggccgcgccagcggcggcggaggctccgagatcgtgatgacccagagccccgctactctgtcggtgtcgcccggagaaagggcgaccctgtcctgccgggcgtcgcagtccgtgagcagcaagctggcttggtaccagcagaagccgggccaggcaccacgcctgcttatgtacggtgcctccattcgggccaccggaatcccggaccggttctcggggtcggggtccggtaccgagttcacactgaccatttcctcgctcgagcccgaggactttgccgtctattactgccagcagtacggctcctcctcatggacgttcggccaggggaccaaggtcgaaatcaagaccactaccccagcaccgaggccacccaccccggctcctaccatcgcctcccagcctctgtccctgcgtccggaggcatgtagacccgcagctggtggggccgtgcatacccggggtcttgacttcgcctgcgatatctacatttgggcccctctggctggtacttgcggggtcctgctgctttcactcgtgatcactctttactgtaagcgcggtcggaagaagctgctgtacatctttaagcaacccttcatgaggcctgtgcagactactcaagaggaggacggctgttcatgccggttcccagaggaggaggaaggcggctgcgaactgcgcgtgaaattcagccgcagcgcagatgctccagcctacaagcaggggcagaaccagctctacaacgaactcaatcttggtcggagagaggagtacgacgtgctggacaagcggagaggacgggacccagaaatgggcgggaagccgcgcagaaagaatccccaagagggcctgtacaacgagctccaaaaggataagatggcagaagcctatagcgagattggtatgaaaggggaacgcagaagaggcaaaggccacgacggactgtaccagggactcagcaccgccaccaaggacacctatgacgctcttcacatgcaggccctgccgcctcgg

SEQ ID NO: 122 - DNA, 1455 bp, Artificial Sequence
  source: /note="Description of Artificial Sequence: Synthetic polynucleotide"
atggccctccctgtcaccgccctgctgcttccgctggctcttctgctccacgccgctcggcccgaagtgcaattggtggagactggaggaggagtggtgcaacctggaggaagcctgagactgtcatgcgcggtgtcgggcttcgccctctccaaccacggaatgtcctgggtccgccgggcccctgggaaaggacttgaatgggtgtccggcatcgtgtactcgggttccacctactacgcggcctcagtgaagggccggtttactattagccgcgacaactccagaaacacactgtacctccaaatgaactcgctgcggccggaagataccgctatctactactgctccgcccatgggggagagtcggacgtctggggacagggcaccactgtcactgtgtccagcgcttccggcggtggtggaagcgggggacgggcctcaggaggcggtggcagcgagattgtgctgacccagtcccccgggaccctgagcctgtccccgggagaaagggccaccctctcctgtcgggcatcccagtccgtggggtctactaaccttgcatggtaccagcagaagcccggccaggcccctcgcctgctgatctacgacgcgtccaatagagccaccggcatcccggatcgcttcagcggaggcggatcgggcaccgacttcaccctcaccatttcaaggctggaaccggaggacttcgccgtgtactactgccagcagtatggttcgtccccaccctggacgttcggccaggggactaaggtcgagatcaagaccactaccccagcaccgaggccacccaccccggctcctaccatcgcctcccagcctctgtccctgcgtccggaggcatgtagacccgcagctggtggggccgtgcatacccggggtcttgacttcgcctgcgatatctacatttgggcccctctggctggtacttgcggggtcctgctgctttcactcgtgatcactctttactgtaagcgcggtcggaagaagctgctgtacatctttaagcaacccttcatgaggcctgtgcagactactcaagaggaggacggctgttcatgccggttcccagaggaggaggaaggcggctgcgaactgcgcgtgaaattcagccgcagcgcagatgctccagcctacaagcaggggcagaaccagctctacaacgaactcaatcttggtcggagagaggagtacgacgtgctggacaagcggagaggacgggacccagaaatgggcgggaagccgcgcagaaagaatccccaagagggcctgtacaacgagctccaaaaggataagatggcagaagcctatagcgagattggtatgaaaggggaacgcagaagaggcaaaggccacgacggactgtaccagggactcagcaccgccaccaaggacacctatgacgctcttcacatgcaggccctgccgcctcgg

SEQ ID NO: 123 - DNA, 1449 bp, Artificial Sequence
  source: /note="Description of Artificial Sequence: Synthetic polynucleotide"
atggccctccctgtcaccgccctgctgcttccgctggctcttctgctccacgccgctcggccccaagtgcaactcgtggaatctggtggaggactcgtgaaacctggaggatcattgagactgtcatgcgcggcctcgggattcacgttctccgattactacatgagctggattcgccaggctccggggaagggactggaatgggtgtcctacatttcctcatccggctccaccatctactacgcggactccgtgaaggggagattcaccattagccgcgataacgccaagaacagcctgtaccttcagatgaactccctgcgggctgaagatactgccgtctactactgcgcaagggagagcggagatgggatggacgtctggggacagggtaccactgtgaccgtgtcgtcggcctccggcggagggggttcgggtggaagggccagcggcggcggaggcagcgacatccagatgacccagtccccctcatcgctgtccgcctccgtgggcgaccgcgtcaccatcacatgccgggcctcacagtcgatctcctcctacctcaattggtatcagcagaagcccggaaaggcccctaagcttctgatctacgcagcgtcctccctgcaatccggggtcccatctcggttctccggctcgggcagcggtaccgacttcactctgaccatctcgagcctgcagccggaggacttcgccacttactactgtcagcaaagctacaccctcgcgtttggccagggcaccaaagtggacatcaagaccactaccccagcaccgaggccacccaccccggctcctaccatcgcctcccagcctctgtccctgcgtccggaggcatgtagacccgcagctggtggggccgtgcatacccggggtcttgacttcgcctgcgatatctacatttgggcccctctggctggtacttgcggggtcctgctgctttcactcgtgatcactctttactgtaagcgcggtcggaagaagctgctgtacatctttaagcaacccttcatgaggcctgtgcagactactcaagaggaggacggctgttcatgccggttcccagaggaggaggaaggcggctgcgaactgcgcgtgaaattcagccgcagcgcagatgctccagcctacaagcaggggcagaaccagctctacaacgaactcaatcttggtcggagagaggagtacgacgtgctggacaagcggagaggacgggacccagaaatgggcgggaagccgcgcagaaagaatccccaagagggcctgtacaacgagctccaaaaggataagatggcagaagcctatagcgagattggtatgaaaggggaacgcagaagaggcaaaggccacgacggactgtaccagggactcagcaccgccaccaaggacacctatgacgctcttcacatgcaggccctgccgcctcgg

SEQ ID NO: 124 - DNA, 1449 bp, Artificial Sequence
  source: /note="Description of Artificial Sequence: Synthetic polynucleotide"
atggccctccctgtcaccgccctgctgcttccgctggctcttctgctccacgccgctcggcccgaagtgcaattggtggaatcagggggaggacttgtgcagcctggaggatcgctgagactgtcatgtgccgtgtccggctttgccctgtccaaccacgggatgtcctgggtccgccgcgcgcctggaaagggcctcgaatgggtgtcgggtattgtgtacagcggtagcacctactatgccgcatccgtgaaggggagattcaccatcagccgggacaactccaggaacactctgtacctccaaatgaattcgctgaggccagaggacactgccatctactactgctccgcgcatggcggagagtccgacgtctggggacaggggaccaccgtgaccgtgtctagcgcgtccggcggaggcggcagcgggggtcgggcatcagggggcggcggatcggacatccagctcacccagtccccgagctcgctgtccgcctccgtgggagatcgggtcaccatcacgtgccgcgccagccagtcgatttcctcctacctgaactggtaccaacagaagcccggaaaagccccgaagcttctcatctacgccgcctcgagcctgcagtcaggagtgccctcacggttctccggctccggttccggtactgatttcaccctgaccatttcctccctgcaaccggaggacttcgctacttactactgccagcagtcgtactccaccccctacactttcggacaaggcaccaaggtcgaaatcaagaccactaccccagcaccgaggccacccaccccggctcctaccatcgcctcccagcctctgtccctgcgtccggaggcatgtagacccgcagctggtggggccgtgcatacccggggtcttgacttcgcctgcgatatctacatttgggcccctctggctggtacttgcggggtcctgctgctttcactcgtgatcactctttactgtaagcgcggtcggaagaagctgctgtacatctttaagcaacccttcatgaggcctgtgcagactactcaagaggaggacggctgttcatgccggttcccagaggaggaggaaggcggctgcgaactgcgcgtgaaattcagccgcagcgcagatgctccagcctacaagcaggggcagaaccagctctacaacgaactcaatcttggtcggagagaggagtacgacgtgctggacaagcggagaggacgggacccagaaatgggcgggaagccgcgcagaaagaatccccaagagggcctgtacaacgagctccaaaaggataagatggcagaagcctatagcgagattggtatgaaaggggaacgcagaagaggcaaaggccacgacggactgtaccagggactcagcaccgccaccaaggacacctatgacgctcttcacatgcaggccctgccgcctcgg

SEQ ID NO: 125 - DNA, 1470 bp, Artificial Sequence
  source: /note="Description of Artificial Sequence: Synthetic polynucleotide"
atggccctccctgtcaccgccctgctgcttccgctggctcttctgctccacgccgctcggccccaagtgcaactggtgcaaagcggaggaggattggtcaaacccggaggaagcctgagactgtcatgcgcggcctctggattcaccttctccgattactacatgtcatggatcagacaggccccggggaagggcctcgaatgggtgtcctacatctcgtcctccgggaacaccatctactacgccgacagcgtgaagggccgctttaccatttcccgcgacaacgcaaagaactcgctgtaccttcagatgaattccctgcgggctgaagataccgcggtgtactattgcgcccggtccactatggtccgggaggactactggggacagggcacactcgtgaccgtgtccagcgcgagcgggggtggaggcagcggtggacgcgcctccggcggcggcggttcagacatcgtgctgactcagtcgcccctgtcgctgccggtcaccctgggccaaccggcctcaattagctgcaagtcctcggagagcctggtgcacaactcaggaaagacttacctgaactggttccatcagcggcctggacagtccccacggaggctcatctatgaagtgtccaacagggattcgggggtgcccgaccgcttcactggctccgggtccggcaccgacttcaccttgaaaatctccagagtggaagccgaggacgtgggcgtgtactactgtatgcagggtacccactggcctggaacctttggacaaggaactaagctcgagattaagaccactaccccagcaccgaggccacccaccccggctcctaccatcgcctcccagcctctgtccctgcgtccggaggcatgtagacccgcagctggtggggccgtgcatacccggggtcttgacttcgcctgcgatatctacatttgggcccctctggctggtacttgcggggtcctgctgctttcactcgtgatcactctttactgtaagcgcggtcggaagaagctgctgtacatctttaagcaacccttcatgaggcctgtgcagactactcaagaggaggacggctgttcatgccggttcccagaggaggaggaaggcggctgcgaactgcgcgtgaaattcagccgcagcgcagatgctccagcctacaagcaggggcagaaccagctctacaacgaactcaatcttggtcggagagaggagtacgacgtgctggacaagcggagaggacgggacccagaaatgggcgggaagccgcgcagaaagaatccccaagagggcctgtacaacgagctccaaaaggataagatggcagaagcctatagcgagattggtatgaaaggggaacgcagaagaggcaaaggccacgacggactgtaccagggactcagcaccgccaccaaggacacctatgacgctcttcacatgcaggccctgccgcctcgg

SEQ ID NO: 126 - DNA, 1449 bp, Artificial Sequence
  source: /note="Description of Artificial Sequence: Synthetic polynucleotide"
atggccctccctgtcaccgccctgctgcttccgctggctcttctgctccacgccgctcggccccaagtgcaactcgtggaatctggtggaggactcgtgcaacccggtggaagccttaggctgtcgtgcgccgtcagcgggtttgctctgagcaaccatggaatgtcctgggtccgccgggcaccgggaaaagggctggaatgggtgtccggcatcgtgtacagcgggtcaacctattacgccgcgtccgtgaagggcagattcactatctcaagagacaacagccggaacaccctgtacttgcaaatgaattccctgcgccccgaggacaccgccatctactactgctccgcccacggaggagagtcggacgtgtggggccagggaacgactgtgactgtgtccagcgcatcaggagggggtggttcgggcggccgggcctcggggggaggaggttccgacattcggctgacccagtccccgtccccactgtcggcctccgtcggcgaccgcgtgaccatcacttgtcaggcgtccgaggacattaacaagttcctgaactggtaccaccagacccctggaaaggcccccaagctgctgatctacgatgcctcgacccttcaaactggagtgcctagccggttctccgggtccggctccggcactgatttcactctgaccatcaactcattgcagccggaagatatcgggacctactattgccagcagtacgaatccctcccgctcacattcggcgggggaaccaaggtcgagattaagaccactaccccagcaccgaggccacccaccccggctcctaccatcgcctcccagcctctgtccctgcgtccggaggcatgtagacccgcagctggtggggccgtgcatacccggggtcttgacttcgcctgcgatatctacatttgggcccctctggctggtacttgcggggtcctgctgctttcactcgtgatcactctttactgtaagcgcggtcggaagaagctgctgtacatctttaagcaacccttcatgaggcctgtgcagactactcaagaggaggacggctgttcatgccggttcccagaggaggaggaaggcggctgcgaactgcgcgtgaaattcagccgcagcgcagatgctccagcctacaagcaggggcagaaccagctctacaacgaactcaatcttggtcggagagaggagtacgacgtgctggacaagcggagaggacgggacccagaaatgggcgggaagccgcgcagaaagaatccccaagagggcctgtacaacgagctccaaaaggataagatggcagaagcctatagcgagattggtatgaaaggggaacgcagaagaggcaaaggccacgacggactgtaccagggactcagcaccgccaccaaggacacctatgacgctcttcacatgcaggccctgccgcctcgg

SEQ ID NO: 127 - DNA, 1452 bp, Artificial Sequence
  source: /note="Description of Artificial Sequence: Synthetic polynucleotide"
atggccctccctgtcaccgccctgctgcttccgctggctcttctgctccacgccgctcggcccgaagtgcaattggtggaaactggaggaggacttgtgcaacctggaggatcattgcggctctcatgcgctgtctccggcttcgccctgtcaaatcacgggatgtcgtgggtcagacgggccccgggaaagggtctggaatgggtgtcggggattgtgtacagcggctccacctactacgccgcttcggtcaagggccgcttcactatttcacgggacaacagccgcaacaccctctatctgcaaatgaactctctccgcccggaggataccgccatctactactgctccgcacacggcggcgaatccgacgtgtggggacagggaaccactgtcaccgtgtcgtccgcatccggtggcggaggatcgggtggccgggcctccgggggcggcggcagcgagactaccctgacccagtcccctgccactctgtccgtgagcccgggagagagagccacccttagctgccgggccagccagagcgtgggctccaacctggcctggtaccagcagaagccaggacagggtcccaggctgctgatctacggagcctccactcgcgcgaccggcatccccgcgaggttctccgggtcgggttccgggaccgagttcaccctgaccatctcctccctccaaccggaggacttcgcggtgtactactgtcagcagtacaacgattggctgcccgtgacatttggacaggggacgaaggtggaaatcaaaaccactaccccagcaccgaggccacccaccccggctcctaccatcgcctcccagcctctgtccctgcgtccggaggcatgtagacccgcagctggtggggccgtgcatacccggggtcttgacttcgcctgcgatatctacatttgggcccctctggctggtacttgcggggtcctgctgctttcactcgtgatcactctttactgtaagcgcggtcggaagaagctgctgtacatctttaagcaacccttcatgaggcctgtgcagactactcaagaggaggacggctgttcatgccggttcccagaggaggaggaaggcggctgcgaactgcgcgtgaaattcagccgcagcgcagatgctccagcctacaagcaggggcagaaccagctctacaacgaactcaatcttggtcggagagaggagtacgacgtgctggacaagcggagaggacgggacccagaaatgggcgggaagccgcgcagaaagaatccccaagagggcctgtacaacgagctccaaaaggataagatggcagaagcctatagcgagattggtatgaaaggggaacgcagaagaggcaaaggccacgacggactgtaccagggactcagcaccgccaccaaggacacctatgacgctcttcacatgcaggccctgccgcctcgg

SEQ ID NO: 128 - DNA, 1455 bp, Artificial Sequence
  source: /note="Description of Artificial Sequence: Synthetic polynucleotide"
atggccctccctgtcaccgccctgctgcttccgctggctcttctgctccacgccgctcggcccgaagtgcaattggtggaatctggtggaggacttgtgcaacctggaggatcactgagactgtcatgcgcggtgtccggttttgccctgagcaatcatgggatgtcgtgggtccggcgcgcccccggaaagggtctggaatgggtgtcgggtatcgtctactccgggagcacttactacgccgcgagcgtgaagggccgcttcaccatttcccgcgataactcccgcaacaccctgtacttgcaaatgaactcgctccggcctgaggacactgccatctactactgctccgcacacggaggagaatccgacgtgtggggccagggaactaccgtgaccgtcagcagcgcctccggcggcgggggctcaggcggacgggctagcggcggcggtggctccgagatcgtgctgacccagtcgcctggcactctctcgctgagccccggggaaagggcaaccctgtcctgtcgggccagccagtccattggatcatcctccctcgcctggtatcagcagaaaccgggacaggctccgcggctgcttatgtatggggccagctcaagagcctccggcattcccgaccggttctccgggtccggttccggcaccgatttcaccctgactatctcgaggctggagccagaggacttcgccgtgtactactgccagcagtacgcggggtccccgccgttcacgttcggacagggaaccaaggtcgagatcaagaccactaccccagcaccgaggccacccaccccggctcctaccatcgcctcccagcctctgtccctgcgtccggaggcatgtagacccgcagctggtggggccgtgcatacccggggtcttgacttcgcctgcgatatctacatttgggcccctctggctggtacttgcggggtcctgctgctttcactcgtgatcactctttactgtaagcgcggtcggaagaagctgctgtacatctttaagcaacccttcatgaggcctgtgcagactactcaagaggaggacggctgttcatgccggttcccagaggaggaggaaggcggctgcgaactgcgcgtgaaattcagccgcagcgcagatgctccagcctacaagcaggggcagaaccagctctacaacgaactcaatcttggtcggagagaggagtacgacgtgctggacaagcggagaggacgggacccagaaatgggcgggaagccgcgcagaaagaatccccaagagggcctgtacaacgagctccaaaaggataagatggcagaagcctatagcgagattggtatgaaaggggaacgcagaagaggcaaaggccacgacggactgtaccagggactcagcaccgccaccaaggacacctatgacgctcttcacatgcaggccctgccgcctcgg

SEQ ID NO: 129 - protein, 243 aa, Artificial Sequence
  source: /note="Description of Artificial Sequence: Synthetic polypeptide"
QVQLQESGPGLVKPSETLSLTCTVSGGSISSSYYYWGWIRQPPGKGLEWIGSIYYSGSAYYNPSLKSRVTISVDTSKNQFSLRLSSVTAADTAVYYCARHWQEWPDAFDIWGQGTMVTVSSGGGGSGGGGSGGGGSETTLTQSPAFMSATPGDKVIISCKASQDIDDAMNWYQQKPGEAPLFIIQSATSPVPGIPPRFSGSGFGTDFSLTINNIESEDAAYYFCLQHDNFPLTFGQGTKLEIK

SEQ ID NO: 130 - protein, 244 aa, Artificial Sequence
  source: /note="Description of Artificial Sequence: Synthetic polypeptide"
VNLRESGPALVKPTQTLTLTCTFSGFSLRTSGMCVSWIRQPPGKALEWLARIDWDEDKFYSTSLKTRLTISKDTSDNQVVLRMTNMDPADTATYYCARSGAGGTSATAFDIWGPGTMVTVSSGGGGSGGGGSGGGGSDIQMTQSPSSLSASVGDRVTITCRASQDIYNNLAWFQLKPGSAPRSLMYAANKSQSGVPSRFSGSASGTDFTLTISSLQPEDFATYYCQHYYRFPYSFGQGTKLEIK

SEQ ID NO: 131 - protein, 246 aa, Artificial Sequence
  source: /note="Description of Artificial Sequence: Synthetic polypeptide"
EVQLVESGGGLVKPGGSLRLSCAASGFTFSSYSMNWVRQAPGKGLEWVSSISSSSSYIYYADSVKGRFTISRDNAKNSLYLQMNSLRAEDTAVYYCAKTIAAVYAFDIWGQGTTVTVSSGGGGSGGGGSGGGGSEIVLTQSPLSLPVTPEEPASISCRSSQSLLHSNGYNYLDWYLQKPGQSPQLLIYLGSNRASGVPDRFSGSGSGTDFTLKISRVEAEDVGVYYCMQALQTPYTFGQGTKLEIK

SEQ ID NO: 132 - protein, 240 aa, Artificial Sequence
  source: /note="Description of Artificial Sequence: Synthetic polypeptide"
EVQLVESGGGLVKPGGSLRLSCAASGFTFSDYYMSWIRQAPGKGLEWVSYISSSGSTIYYADSVKGRFTISRDNAKNSLYLQMNSLRAEDTAVYYCARDLRGAFDIWGQGTMVTVSSGGGGSGGGGSGGGGSSYVLTQSPSVSAAPGYTATISCGGNNIGTKSVHWYQQKPGQAPLLVIRDDSVRPSKIPGRFSGSNSGNMATLTISGVQAGDEADFYCQVWDSDSEHVVFGGGTKLTVL

SEQ ID NO: 133 - protein, 241 aa, Artificial Sequence
  source: /note="Description of Artificial Sequence: Synthetic polypeptide"
QVQLVQSGAEVKKPGASVKVSCKPSGYTVTSHYIHWVRRAPGQGLEWMGMINPSGGVTAYSQTLQGRVTMTSDTSSSTVYMELSSLRSEDTAMYYCAREGSGSGWYFDFWGRGTLVTVSSGGGGSGGGGSGGGGSSYVLTQPPSVSVSPGQTASITCSGDGLSKKYVSWYQQKAGQSPVVLISRDKERPSGIPDRFSGSNSADTATLTISGTQAMDEADYYCQAWDDTTVVFGGGTKLTVL

SEQ ID NO: 134 - protein, 245 aa, Artificial Sequence
  source: /note="Description of Artificial Sequence: Synthetic polypeptide"
QVQLQESGPGLVKPSQTLSLTCTVSGGSISSGGYYWSWIRQHPGKGLEWIGYIYYSGSTYYNPSLKSRVTISVDTSKNQFSLKLSSVTAADTAVYYCARAGIAARLRGAFDIWGQGTMVTVSSGGGGSGGGGSGGGGSDIVMTQSPSSVSASVGDRVIITCRASQGIRNWLAWYQQKPGKAPNLLIYAASNLQSGVPSRFSGSGSGADFTLTISSLQPEDVATYYCQKYNSAPFTFGPGTKVDIK

SEQ ID NO: 135 - protein, 253 aa, Artificial Sequence
  source: /note="Description of Artificial Sequence: Synthetic polypeptide"
QVQLVQSGAEVKKPGSSVKVSCKASGGTFSSYAISWVRQAPGQGLEWMGGIIPIFGTANYAQKFQGRVTITADESTSTAYMELSSLRSEDTAVYYCARRGGYQLLRWDVGLLRSAFDIWGQGTMVTVSSGGGGSGGGGSGGGGSSYVLTQPPSVSVAPGQTARITCGGNNIGSKSVHWYQQKPGQAPVLVLYGKNNRPSGVPDRFSGSRSGTTASLTITGAQAEDEADYYCSSRDSSGDHLRVFGTGTKVTVL

SEQ ID NO: 136 - protein, 248 aa, Artificial Sequence
  source: /note="Description of Artificial Sequence: Synthetic polypeptide"
EVQLQQSGPGLVKPSQTLSLTCAISGDSVSSNSAAWNWIRQSPSRGLEWLGRTYYRSKWYSFYAISLKSRIIINPDTSKNQFSLQLKSVTPEDTAVYYCARSSPEGLFLYWFDPWGQGTLVTVSSGGDGSGGGGSGGGGSSSELTQDPAVSVALGQTIRITCQGDSLGNYYATWYQQKPGQAPVLVIYGTNNRPSGIPDRFSASSSGNTASLTITGAQAEDEADYYCNSRDSSGHHLLFGTGTKVTVL

SEQ ID NO: 137 - protein, 246 aa, Artificial Sequence
  source: /note="Description of Artificial Sequence: Synthetic polypeptide"
EVQLVESGGGLVQPGGSLRLSCAASGFTFSSYAMSWVRQAPGKGLEWVSAISGSGGSTYYADSVKGRFTISRDNSKNTLYLQMNSLRAEDTAVYYCAKVEGSGSLDYWGQGTLVTVSSGGGGSGGGGSGGGGSEIVMTQSPGTLSLSPGERATLSCRASQSVSSAYLAWYQQKPGQPPRLLISGASTRATGIPDRFGGSGSGTDFTLTISRLEPEDFAVYYCQHYGSSFNGSSLFTFGQGTRLEIK

SEQ ID NO: 138 - protein, 241 aa, Artificial Sequence
  source: /note="Description of Artificial Sequence: Synthetic polypeptide"
EVQLVETGGGLVQPGGSLRLSCAASGITFSRYPMSWVRQAPGKGLEWVSGISDSGVSTYYADSAKGRFTISRDNSKNTLFLQMSSLRDEDTAVYYCVTRAGSEASDIWGQGTMVTVSSGGGGSGGGGSGGGGSEIVLTQSPATLSLSPGERATLSCRASQSVSNSLAWYQQKPGQAPRLLIYDASSRATGIPDRFSGSGSGTDFTLTISRLEPEDFAIYYCQQFGTSSGLTFGGGTKLEIK

SEQ ID NO: 139 - protein, 248 aa, Artificial Sequence
  source: /note="Description of Artificial Sequence: Synthetic polypeptide"
QVQLVESGGGLVQPGGSLRLSCAASGFTFSSYAMSWVRQAPGKGLEWVSAISGSGGSTYYADSVKGRFTISRDNAKNSLYLQMNSLRAEDTAIYYCARATYKRELRYYYGMDVWGQGTMVTVSSGGGGSGGGGSGGGGSEIVMTQSPGTVSLSPGERATLSCRASQSVSSSFLAWYQQKPGQAPRLLIYGASSRATGIPDRFSGSGSGTDFTLTISRLEPEDSAVYYCQQYHSSPSWTFGQGTRLEIK

SEQ ID NO: 140 - protein, 248 aa, Artificial Sequence
  source: /note="Description of Artificial Sequence: Synthetic polypeptide"
EVQLVETGGGLVQPGGSLRLSCAASGFTFSSYAMSWVRQAPGKGLEWVSAISGSGGSTYYADSVKGRFTISRDNSKNTLYLQMNTLKAEDTAVYYCARATYKRELRYYYGMDVWGQGTTVTVSSGGGGSGGGGSGGGGSEIVLTQSPSTLSLSPGESATLSCRASQSVSTTFLAWYQQKPGQAPRLLIYGSSNRATGIPDRFSGSGSGTDFTLTIRRLEPEDFAVYYCQQYHSSPSWTFGQGTKVEIK

SEQ ID NO: 141 - protein, 239 aa, Artificial Sequence
  source: /note="Description of Artificial Sequence: Synthetic polypeptide"
EVQLVETGGGLVQPGRSLRLSCAASGFTFDDYAMHWVRQAPGKGLEWVSGISWNSGSIGYADSVKGRFTISRDNAKNSLYLQMNSLRDEDTAVYYCARVGKAVPDVWGQGTTVTVSSGGGGSGGGGSGGGGSDIVMTQTPSSLSASVGDRVTITCRASQSISSYLNWYQQKPGKAPKLLIYAASSLQSGVPSRFSGSGSGTDFTLTISSLQPEDFATYYCQQSYSTPYSFGQGTRLEIK

SEQ ID NO: 142 - protein, 246 aa, Artificial Sequence
  source: /note="Description of Artificial Sequence: Synthetic polypeptide"
EVQLVESGGGLVQPGRSLRLSCTASGFTFDDYAMHWVRQRPGKGLEWVASINWKGNSLAYGDSVKGRFAISRDNAKNTVFLQMNSLRTEDTAVYYCASHQGVAYYNYAMDVWGRGTLVTVSSGGGGSGGGGSGGGGSEIVLTQSPGTLSLSPGERATLSCRATQSIGSSFLAWYQQRPGQAPRLLIYGASQRATGIPDRFSGRGSGTDFTLTISRVEPEDSAVYYCQHYESSPSWTFGQGTKVEIK

SEQ ID NO: 143 - protein, 241 aa, Artificial Sequence
  source: /note="Description of Artificial Sequence: Synthetic polypeptide"
EVQLVESGGGLVQPGGSLRLSCAASGFTFSSYAMSWVRQAPGKGLEWVSAISGSGGSTYYADSVKGRFTISRDNSKNTLYLQMNSLRAEDTAVYYCAKVVRDGMDVWGQGTTVTVSSGGGGSGGGGSGGGGSEIVLTQSPATLSLSPGERATLSCRASQSVSSSYLAWYQQKPGQAPRLLIYGASSRATGIPDRFSGNGSGTDFTLTISRLEPEDFAVYYCQQYGSPPRFTFGPGTKVDIK

SEQ ID NO: 144 - protein, 242 aa, Artificial Sequence
  source: /note="Description of Artificial Sequence: Synthetic polypeptide"
EVQLLESGGGLVQPGGSLRLSCAASGFTFSSYAMSWVRQAPGKGLEWVSAISGSGGSTYYADSVKGRFTISRDNSKNTLYLQMNSLRAEDTAVYYCAKIPQTGTFDYWGQGTLVTVSSGGGGSGGGGSGGGGSEIVLTQSPGTLSLSPGERATLSCRASQSVSSSYLAWYQQRPGQAPRLLIYGASSRATGIPDRFSGSGSGTDFTLTISRLEPEDFAVYYCQHYGSSPSWTFGQGTRLEIK

SEQ ID NO: 145 - protein, 248 aa, Artificial Sequence
  source: /note="Description of Artificial Sequence: Synthetic polypeptide"
EVQLVETGGGLVQPGGSLRLSCAASGFTFSSYAMSWVRQAPGKGLEWVSAISGSGGSTYYADSVKGRFTMSRENDKNSVFLQMNSLRVEDTGVYYCARANYKRELRYYYGMDVWGQGTMVTVSSGGGGSGGGGSGGGGSEIVMTQSPGTLSLSPGESATLSCRASQRVASNYLAWYQHKPGQAPSLLISGASSRATGVPDRFSGSGSGTDFTLAISRLEPEDSAVYYCQHYDSSPSWTFGQGTKVEIK

SEQ ID NO: 146 - protein, 244 aa, Artificial Sequence
  source: /note="Description of Artificial Sequence: Synthetic polypeptide"
EVQLLETGGGLVQPGGSLRLSCAASGFSFSSYAMSWVRQAPGKGLEWVSAISGSGGSTYYADSVKGRFTISRDNSKNTLYLQMNSLRAEDTAVYYCAKALVGATGAFDIWGQGTLVTVSSGGGGSGGGGSGGGGSEIVLTQSPGTLSLSPGERATLSCRASQSLSSNFLAWYQQKPGQAPGLLIYGASNWATGTPDRFSGSGSGTDFTLTITRLEPEDFAVYYCQYYGTSPMYTFGQGTKVEIK

SEQ ID NO: 147 - protein, 244 aa, Artificial Sequence
  source: /note="Description of Artificial Sequence: Synthetic polypeptide"
EVQLLESGGGLVQPGGSLRLSCAASGFTFSSYAMSWVRQAPGKGLEWVSAISGSGGSTYYADSVKGRFTISRDNSKNTLYLQMNSLRAEDTAVYYCVLWFGEGFDPWGQGTLVTVSSGGGGSGGGGSGGGGSDIVLTQSPLSLPVTPGEPASISCRSSQSLLHSNGYNYLDWYLQKPGQSPQLLIYLGSNRASGVPDRFSGSGSGTDFTLKISRVEAEDVGVYYCMQALQTPLTFGGGTKVDIK

SEQ ID NO: 148 - protein, 251 aa, Artificial Sequence
  source: /note="Description of Artificial Sequence: Synthetic polypeptide"
QVQLVESGGGLVQPGGSLRLSCAASGFTFSSYAMSWVRQAPGKGLEWVSAISGSGGSTYYADSVKGRFTISRDNSKNTLYLQMNSLRAEDTAVYYCAKVGYDSSGYYRDYYGMDVWGQGTTVTVSSGGGGSGGGGSGGGGSEIVLTQSPGTLSLSPGERATLSCRASQSVSSSYLAWYQQKPGQAPRLLIYGTSSRATGISDRFSGSGSGTDFTLTISRLEPEDFAVYYCQHYGNSPPKFTFGPGTKLEIK

SEQ ID NO: 149 - protein, 246 aa, Artificial Sequence
  source: /note="Description of Artificial Sequence: Synthetic polypeptide"
EVQLVESGGGLVQPGGSLRLSCAASGFTFSSYAMSWVRQAPGKGLEWVSAISGSGGSTYYADSVKGRFTISRDNSKNTLYLQMNSLRAEDTAVYYCAKMGWSSGYLGAFDIWGQGTTVTVSSGGGGSGGGGSGGGGSEIVLTQSPGTLSLSPGERATLSCRASQSVASSFLAWYQQKPGQAPRLLIYGASGRATGIPDRFSGSGSGTDFTLTISRLEPEDFAVYYCQHYGGSPRLTFGGGTKVDIK

SEQ ID NO: 150 - DNA, 729 bp, Artificial Sequence
  source: /note="Description of Artificial Sequence: Synthetic polynucleotide"
caagtgcagcttcaggaaagcggaccgggcctggtcaagccatccgaaactctctccctgacttgcactgtgtctggcggttccatctcatcgtcgtactactactggggctggattaggcagccgcccggaaagggactggagtggatcggaagcatctactattccggctcggcgtactacaaccctagcctcaagtcgagagtgaccatctccgtggatacctccaagaaccagttttccctgcgcctgagctccgtgaccgccgctgacaccgccgtgtactactgtgctcggcattggcaggaatggcccgatgccttcgacatttggggccagggcactatggtcactgtgtcatccgggggtggaggcagcgggggaggagggtccggggggggaggttcagagacaaccttgacccagtcacccgcattcatgtccgccactccgggagacaaggtcatcatctcgtgcaaagcgtcccaggatatcgacgatgccatgaattggtaccagcagaagcctggcgaagcgccgctgttcattatccaatccgcaacctcgcccgtgcctggaatcccaccgcggttcagcggcagcggtttcggaaccgacttttccctgaccattaacaacattgagtccgaggacgccgcctactacttctgcctgcaacacgacaacttccctctcacgttcggccagggaaccaagctggaaatcaag

SEQ ID NO: 151 - DNA, 735 bp, Artificial Sequence
  source: /note="Description of Artificial Sequence: Synthetic polynucleotide"
caagtcaatctgcgcgaatccggccccgccttggtcaagcctacccagaccctcactctgacctgtactttctccggcttctccctgcggacttccgggatgtgcgtgtcctggatcagacagcctccgggaaaggccctggagtggctcgctcgcattgactgggatgaggacaagttctactccacctcactcaagaccaggctgaccatcagcaaagatacctctgacaaccaagtggtgctccgcatgaccaacatggacccagccgacactgccacttactactgcgcgaggagcggagcgggcggaacctccgccaccgccttcgatatttggggcccgggtaccatggtcaccgtgtcaagcggaggaggggggtccgggggcggcggttccgggggaggcggatcggacattcagatgactcagtcaccatcgtccctgagcgctagcgtgggcgacagagtgacaatcacttgccgggcatcccaggacatctataacaaccttgcgtggttccagctgaagcctggttccgcaccgcggtcacttatgtacgccgccaacaagagccagtcgggagtgccgtcccggttttccggttcggcctcgggaactgacttcaccctgacgatctccagcctgcaacccgaggatttcgccacctactactgccagcactactaccgctttccctactcgttcggacagggaaccaagctggaaatcaag

SEQ ID NO: 152 - DNA, 738 bp, Artificial Sequence
  source: /note="Description of Artificial Sequence: Synthetic polynucleotide"
gaagtgcagcttgtcgaatccggggggggactggtcaagccgggcggatcactgagactgtcctgcgccgcgagcggcttcacgttctcctcctactccatgaactgggtccgccaagcccccgggaagggactggaatgggtgtcctctatctcctcgtcgtcgtcctacatctactacgccgactccgtgaagggaagattcaccatttcccgcgacaacgcaaagaactcactgtacttgcaaatgaactcactccgggccgaagatactgctgtgtactattgcgccaagactattgccgccgtctacgctttcgacatctggggccagggaaccaccgtgactgtgtcgtccggtggtggtggctcgggcggaggaggaagcggcggcggggggtccgagattgtgctgacccagtcgccactgagcctccctgtgacccccgaggaacccgccagcatcagctgccggtccagccagtccctgctccactccaacggatacaattacctcgattggtaccttcagaagcctggacaaagcccgcagctgctcatctacttgggatcaaaccgcgcgtcaggagtgcctgaccggttctccggctcgggcagcggtaccgatttcaccctgaaaatctccagggtggaggcagaggacgtgggagtgtattactgtatgcaggcgctgcagactccgtacacatttgggcagggcaccaagctggagatcaag

SEQ ID NO: 153 - DNA, 720 bp, Artificial Sequence
  source: /note="Description of Artificial Sequence: Synthetic polynucleotide"
gaagtccagctcgtggagtccggcggaggccttgtgaagcctggaggttcgctgagactgtcctgcgccgcctccggcttcaccttctccgactactacatgtcctggatcagacaggccccgggaaagggcctggaatgggtgtcctacatctcgtcatcgggcagcactatctactacgcggactcagtgaaggggcggttcaccatttcccgggataacgcgaagaactcgctgtatctgcaaatgaactcactgagggccgaggacaccgccgtgtactactgcgcccgcgatctccgcggggcatttgacatctggggacagggaaccatggtcacagtgtccagcggagggggaggatcgggtggcggaggttccgggggtggaggctcctcctacgtgctgactcagagcccaagcgtcagcgctgcgcccggttacacggcaaccatctcctgtggcggaaacaacattgggaccaagtctgtgcactggtatcagcagaagccgggccaagctcccctgttggtgatccgcgatgactccgtgcggcctagcaaaattccgggacggttctccggctccaacagcggcaatatggccactctcaccatctcgggagtgcaggccggagatgaagccgacttctactgccaagtctgggactcagactccgagcatgtggtgttcgggggcggaaccaagctgactgtgctc

SEQ ID NO: 154 - DNA, 723 bp, Artificial Sequence
  source: /note="Description of Artificial Sequence: Synthetic polynucleotide"
caagtgcagctggtgcagagcggggccgaagtcaagaagccgggagcctccgtgaaagtgtcctgcaagccttcgggatacaccgtgacctcccactacattcattgggtccgccgcgcccccggccaaggactcgagtggatgggcatgatcaaccctagcggcggagtgaccgcgtacagccagacgctgcagggacgcgtgactatgacctcggatacctcctcctccaccgtctatatggaactgtccagcctgcggtccgaggataccgccatgtactactgcgcccgggaaggatcaggctccgggtggtatttcgacttctggggaagaggcaccctcgtgactgtgtcatctgggggagggggttccggtggtggcggatcgggaggaggcggttcatcctacgtgctgacccagccaccctccgtgtccgtgagccccggccagactgcatcgattacatgtagcggcgacggcctctccaagaaatacgtgtcgtggtaccagcagaaggccggacagagcccggtggtgctgatctcaagagataaggagcggcctagcggaatcccggacaggttctcgggttccaactccgcggacactgctactctgaccatctcggggacccaggctatggacgaagccgattactactgccaagcctgggacgacactactgtcgtgtttggagggggcaccaagttgaccgtcctt

SEQ ID NO: 155 - DNA, 735 bp, Artificial Sequence
  source: /note="Description of Artificial Sequence: Synthetic polynucleotide"
caagtgcagcttcaggagagcggcccgggactcgtgaagccgtcccagaccctgtccctgacttgcaccgtgtcgggaggaagcatctcgagcggaggctactattggtcgtggattcggcagcaccctggaaagggcctggaatggatcggctacatctactactccggctcgacctactacaacccatcgctgaagtccagagtgacaatctcagtggacacgtccaagaatcagttcagcctgaagctctcttccgtgactgcggccgacaccgccgtgtactactgcgcacgcgctggaattgccgcccggctgaggggtgccttcgacatttggggacagggcaccatggtcaccgtgtcctccggcggcggaggttccgggggtggaggctcaggaggaggggggtccgacatcgtcatgactcagtcgccctcaagcgtcagcgcgtccgtcggggacagagtgatcatcacctgtcgggcgtcccagggaattcgcaactggctggcctggtatcagcagaagcccggaaaggcccccaacctgttgatctacgccgcctcaaacctccaatccggggtgccgagccgcttcagcggctccggttcgggtgccgatttcactctgaccatctcctccctgcaacctgaagatgtggctacctactactgccaaaagtacaactccgcaccttttactttcggaccggggaccaaagtggacattaag

SEQ ID NO: 156 - DNA, 759 bp, Artificial Sequence
  source: /note="Description of Artificial Sequence: Synthetic polynucleotide"
caagtgcagctggtccagtcgggcgccgaggtcaagaagcccgggagctctgtgaaagtgtcctgcaaggcctccgggggcacctttagctcctacgccatctcctgggtccgccaagcaccgggtcaaggcctggagtggatggggggaattatccctatcttcggcactgccaactacgcccagaagttccagggacgcgtgaccattaccgcggacgaatccacctccaccgcttatatggagctgtccagcttgcgctcggaagataccgccgtgtactactgcgcccggaggggtggataccagctgctgagatgggacgtgggcctcctgcggtcggcgttcgacatctggggccagggcactatggtcactgtgtccagcggaggaggcggatcgggaggcggcggatcagggggaggcggttccagctacgtgcttactcaacccccttcggtgtccgtggccccgggacagaccgccagaatcacttgcggaggaaacaacattgggtccaagagcgtgcattggtaccagcagaagccaggacaggcccctgtgctggtgctctacgggaagaacaatcggcccagcggagtgccggacaggttctcgggttcacgctccggtacaaccgcttcactgactatcaccggggcccaggcagaggatgaagcggactactactgttcctcccgggattcatccggcgaccacctccgggtgttcggaaccggaacgaaggtcaccgtgctg

SEQ ID NO: 157 - DNA, 744 bp, Artificial Sequence
  source: /note="Description of Artificial Sequence: Synthetic polynucleotide"
gaagtgcagctccaacagtcaggaccggggctcgtgaagccatcccagaccctgtccctgacttgtgccatctcgggagatagcgtgtcatcgaactccgccgcctggaactggattcggcagagcccgtcccgcggactggagtggcttggaaggacctactaccggtccaagtggtactctttctacgcgatctcgctgaagtcccgcattatcattaaccctgatacctccaagaatcagttctccctccaactgaaatccgtcacccccgaggacacagcagtgtattactgcgcacggagcagccccgaaggactgttcctgtattggtttgacccctggggccaggggactcttgtgaccgtgtcgagcggcggagatgggtccggtggcggtggttcggggggcggcggatcatcatccgaactgacccaggacccggctgtgtccgtggcgctgggacaaaccatccgcattacgtgccagggagactccctgggcaactactacgccacttggtaccagcagaagccgggccaagcccctgtgttggtcatctacgggaccaacaacagaccttccggcatccccgaccggttcagcgcttcgtcctccggcaacactgccagcctgaccatcactggagcgcaggccgaagatgaggccgactactactgcaacagcagagactcctcgggtcatcacctcttgttcggaactggaaccaaggtcaccgtgctg

SEQ ID NO: 158 - DNA, 738 bp, Artificial Sequence
  source: /note="Description of Artificial Sequence: Synthetic polynucleotide"
gaagtgcagctcgtggagtcaggaggcggcctggtccagccgggagggtcccttagactgtcatgcgccgcaagcggattcactttctcctcctatgccatgagctgggtccgccaagcccccggaaagggactggaatgggtgtccgccatctcggggtctggaggctcaacttactacgctgactccgtgaagggacggttcaccattagccgcgacaactccaagaacaccctctacctccaaatgaactccctgcgggccgaggataccgccgtctactactgcgccaaagtggaaggttcaggatcgctggactactggggacagggtactctcgtgaccgtgtcatcgggcggaggaggttccggcggtggcggctccggcggcggagggtcggagatcgtgatgacccagagccctggtactctgagcctttcgccgggagaaagggccaccctgtcctgccgcgcttcccaatccgtgtcctccgcgtacttggcgtggtaccagcagaagccgggacagccccctcggctgctgatcagcggggccagcacccgggcaaccggaatcccagacagattcgggggttccggcagcggcacagatttcaccctgactatttcgaggttggagcccgaggactttgcggtgtattactgtcagcactacgggtcgtcctttaatggctccagcctgttcacgttcggacaggggacccgcctggaaatcaag

SEQ ID NO: 159 - DNA, 723 bp, Artificial Sequence
  source: /note="Description of Artificial Sequence: Synthetic polynucleotide"
gaagtgcaactggtggaaaccggtggcggcctggtgcagcctggaggatcattgaggctgtcatgcgcggccagcggtattaccttctcccggtaccccatgtcctgggtcagacaggccccggggaaagggcttgaatgggtgtccgggatctcggactccggtgtcagcacttactacgccgactccgccaagggacgcttcaccatttcccgggacaactcgaagaacaccctgttcctccaaatgagctccctccgggacgaggatactgcagtgtactactgcgtgacccgcgccgggtccgaggcgtctgacatttggggacagggcactatggtcaccgtgtcgtccggcggagggggctcgggaggcggtggcagcggaggaggagggtccgagatcgtgctgacccaatccccggccaccctctcgctgagccctggagaaagggcaaccttgtcctgtcgcgcgagccagtccgtgagcaactccctggcctggtaccagcagaagcccggacaggctccgagacttctgatctacgacgcttcgagccgggccactggaatccccgaccgcttttcggggtccggctcaggaaccgatttcaccctgacaatctcacggctggagccagaggatttcgccatctattactgccagcagttcggtacttcctccggcctgactttcggaggcggcacgaagctcgaaatcaag

SEQ ID NO: 160 - DNA, 744 bp, Artificial Sequence
  source: /note="Description of Artificial Sequence: Synthetic polynucleotide"
caagtgcagctcgtggaatcgggtggcggactggtgcagccggggggctcacttagactgtcctgcgcggccagcggattcactttctcctcctacgccatgtcctgggtcagacaggcccctggaaagggcctggaatgggtgtccgcaatcagcggcagcggcggctcgacctattacgcggattcagtgaagggcagattcaccatttcccgggacaacgccaagaactccttgtaccttcaaatgaactccctccgcgcggaagataccgcaatctactactgcgctcgggccacttacaagagggaactgcgctactactacgggatggacgtctggggccagggaaccatggtcaccgtgtccagcggaggaggaggatcgggaggaggcggtagcgggggtggagggtcggagatcgtgatgacccagtcccccggcactgtgtcgctgtcccccggcgaacgggccaccctgtcatgtcgggccagccagtcagtgtcgtcaagcttcctcgcctggtaccagcagaaaccgggacaagctccccgcctgctgatctacggagccagcagccgggccaccggtattcctgaccggttctccggttcggggtccgggaccgactttactctgactatctctcgcctcgagccagaggactccgccgtgtattactgccagcagtaccactcctccccgtcctggacgttcggacagggcacaaggctggagattaag

SEQ ID NO: 161 - DNA, 744 bp, Artificial Sequence
  source: /note="Description of Artificial Sequence: Synthetic polynucleotide"
gaggtgcagcttgtggaaaccggtggcggactggtgcagcccggaggaagcctcaggctgtcctgcgccgcgtccggcttcaccttctcctcgtacgccatgtcctgggtccgccaggcccccggaaagggcctggaatgggtgtccgccatctctggaagcggaggttccacgtactacgcggacagcgtcaagggaaggttcacaatctcccgcgataattcgaagaacactctgtaccttcaaatgaacaccctgaaggccgaggacactgctgtgtactactgcgcacgggccacctacaagagagagctccggtactactacggaatggacgtctggggccagggaactactgtgaccgtgtcctcgggagggggtggctccggggggggcggctccggcggaggcggttccgagattgtgctgacccagtcaccttcaactctgtcgctgtccccgggagagagcgctactctgagctgccgggccagccagtccgtgtccaccaccttcctcgcctggtatcagcagaagccggggcaggcaccacggctcttgatctacgggtcaagcaacagagcgaccggaattcctgaccgcttctcggggagcggttcaggcaccgacttcaccctgactatccggcgcctggaacccgaagatttcgccgtgtattactgtcaacagtaccactcctcgccgtcctggacctttggccaaggaaccaaagtggaaatcaag

SEQ ID NO: 162 - DNA, 717 bp, Artificial Sequence
  source: /note="Description of Artificial Sequence: Synthetic polynucleotide"
gaagtgcagctcgtggaaactggaggtggactcgtgcagcctggacggtcgctgcggctgagctgcgctgcatccggcttcaccttcgacgattatgccatgcactgggtcagacaggcgccagggaagggacttgagtgggtgtccggtatcagctggaatagcggctcaatcggatacgcggactccgtgaagggaaggttcaccatttcccgcgacaacgccaagaactccctgtacttgcaaatgaacagcctccgggatgaggacactgccgtgtactactgcgcccgcgtcggaaaagctgtgcccgacgtctggggccagggaaccactgtgaccgtgtccagcggcgggggtggatcgggcggtggagggtccggtggagggggctcagatattgtgatgacccagaccccctcgtccctgtccgcctcggtcggcgaccgcgtgactatcacatgtagagcctcgcagagcatctccagctacctgaactggtatcagcagaagccggggaaggccccgaagctcctgatctacgcggcatcatcactgcaatcgggagtgccgagccggttttccgggtccggctccggcaccgacttcacgctgaccatttcttccctgcaacccgaggacttcgccacttactactgccagcagtcctactccaccccttactccttcggccaaggaaccaggctggaaatcaag

SEQ ID NO: 163 - DNA, 738 bp, Artificial Sequence
  source: /note="Description of Artificial Sequence: Synthetic polynucleotide"
gaagtgcagctcgtggagagcgggggaggattggtgcagcccggaaggtccctgcggctctcctgcactgcgtctggcttcaccttcgacgactacgcgatgcactgggtcagacagcgcccgggaaagggcctggaatgggtcgcctcaatcaactggaagggaaactccctggcctatggcgacagcgtgaagggccgcttcgccatttcgcgcgacaacgccaagaacaccgtgtttctgcaaatgaattccctgcggaccgaggataccgctgtgtactactgcgccagccaccagggcgtggcatactataactacgccatggacgtgtggggaagagggacgctcgtcaccgtgtcctccgggggcggtggatcgggtggaggaggaagcggtggcgggggcagcgaaatcgtgctgactcagagcccgggaactctttcactgtccccgggagaacgggccactctctcgtgccgggccacccagtccatcggctcctccttccttgcctggtaccagcagaggccaggacaggcgccccgcctgctgatctacggtgcttcccaacgcgccactggcattcctgaccggttcagcggcagagggtcgggaaccgatttcacactgaccatttcccgggtggagcccgaagattcggcagtctactactgtcagcattacgagtcctccccttcatggaccttcggtcaagggaccaaagtggagatcaag

SEQ ID NO: 164 - DNA, 723 bp, Artificial Sequence
  source: /note="Description of Artificial Sequence: Synthetic polynucleotide"
gaggtgcagttggtcgaaagcgggggcgggcttgtgcagcctggcggatcactgcggctgtcctgcgcggcatcaggcttcacgttttcttcctacgccatgtcctgggtgcgccaggcccctggaaagggactggaatgggtgtccgcgatttcggggtccggcgggagcacctactacgccgattccgtgaagggccgcttcactatctcgcgggacaactccaagaacaccctctacctccaaatgaatagcctgcgggccgaggataccgccgtctactattgcgctaaggtcgtgcgcgacggaatggacgtgtggggacagggtaccaccgtgacagtgtcctcggggggaggcggtagcggcggaggaggaagcggtggtggaggttccgagattgtgctgactcaatcacccgcgaccctgagcctgtcccccggcgaaagggccactctgtcctgtcgggccagccaatcagtctcctcctcgtacctggcctggtaccagcagaagccaggacaggctccgagactccttatctatggcgcatcctcccgcgccaccggaatcccggataggttctcgggaaacggatcggggaccgacttcactctcaccatctcccggctggaaccggaggacttcgccgtgtactactgccagcagtacggcagcccgcctagattcactttcggccccggcaccaaagtggacatcaag

SEQ ID NO: 165 - DNA, 726 bp, Artificial Sequence
  source: /note="Description of Artificial Sequence: Synthetic polynucleotide"
gaagtgcagctgctggagtccggcggtggattggtgcaaccggggggatcgctcagactgtcctgtgcggcgtcaggcttcaccttctcgagctacgccatgtcatgggtcagacaggcccctggaaagggtctggaatgggtgtccgccatttccgggagcgggggatctacatactacgccgatagcgtgaagggccgcttcaccatttcccgggacaactccaagaacactctctatctgcaaatgaactccctccgcgctgaggacactgccgtgtactactgcgccaaaatccctcagaccggcaccttcgactactggggacaggggactctggtcaccgtcagcagcggtggcggaggttcggggggaggaggaagcggcggcggagggtccgagattgtgctgacccagtcacccggcactttgtccctgtcgcctggagaaagggccaccctttcctgccgggcatcccaatccgtgtcctcctcgtacctggcctggtaccagcagaggcccggacaggccccacggcttctgatctacggagcaagcagccgcgcgaccggtatcccggaccggttttcgggctcgggctcaggaactgacttcaccctcaccatctcccgcctggaacccgaagatttcgctgtgtattactgccagcactacggcagctccccgtcctggacgttcggccagggaactcggctggagatcaag

SEQ ID NO: 166 - DNA, 744 bp, Artificial Sequence
  source: /note="Description of Artificial Sequence: Synthetic polynucleotide"
gaagtgcaactggtggaaaccggtggaggactcgtgcagcctggcggcagcctccggctgagctgcgccgcttcgggattcaccttttcctcctacgcgatgtcttgggtcagacaggcccccggaaaggggctggaatgggtgtcagccatctccggctccggcggatcaacgtactacgccgactccgtgaaaggccggttcaccatgtcgcgcgagaatgacaagaactccgtgttcctgcaaatgaactccctgagggtggaggacaccggagtgtactattgtgcgcgcgccaactacaagagagagctgcggtactactacggaatggacgtctggggacagggaactatggtgaccgtgtcatccggtggagggggaagcggcggtggaggcagcgggggcgggggttcagaaattgtcatgacccagtccccgggaactctttccctctcccccggggaatccgcgactttgtcctgccgggccagccagcgcgtggcctcgaactacctcgcatggtaccagcataagccaggccaagccccttccctgctgatttccggggctagcagccgcgccactggcgtgccggataggttctcgggaagcggctcgggtaccgatttcaccctggcaatctcgcggctggaaccggaggattcggccgtgtactactgccagcactatgactcatccccctcctggacattcggacagggcaccaaggtcgagatcaag

SEQ ID NO: 167 - DNA, 732 bp, Artificial Sequence
  source: /note="Description of Artificial Sequence: Synthetic polynucleotide"
gaagtgcagctgctcgaaaccggtggagggctggtgcagccagggggctccctgaggctttcatgcgccgctagcggattctccttctcctcttacgccatgtcgtgggtccgccaagcccctggaaaaggcctggaatgggtgtccgcgatttccgggagcggaggttcgacctattacgccgactccgtgaagggccgctttaccatctcccgggataactccaagaacactctgtacctccaaatgaactcgctgagagccgaggacaccgccgtgtattactgcgcgaaggcgctggtcggcgcgactggggcattcgacatctggggacagggaactcttgtgaccgtgtcgagcggaggcggcggctccggcggaggagggagcgggggcggtggttccgaaatcgtgttgactcagtccccgggaaccctgagcttgtcacccggggagcgggccactctctcctgtcgcgcctcccaatcgctctcatccaatttcctggcctggtaccagcagaagcccggacaggccccgggcctgctcatctacggcgcttcaaactgggcaacgggaacccctgatcggttcagcggaagcggatcgggtactgactttaccctgaccatcaccagactggaaccggaggacttcgccgtgtactactgccagtactacggcacctcccccatgtacacattcggacagggtaccaaggtcgagattaag

SEQ ID NO: 168 - DNA, 733 bp, Artificial Sequence
  source: /note="Description of Artificial Sequence: Synthetic polynucleotide"
gaagtgcagctgcttgagagcggtggaggtctggtgcagcccgggggatcactgcgcctgtcctgtgccgcgtccggtttcactttctcctcgtacgccatgtcgtgggtcagacaggcaccgggaaagggactggaatgggtgtcagccatttcgggttcggggggcagcacctactacgctgactccgtgaagggccggttcaccatttcccgcgacaactccaagaacaccttgtacctccaaatgaactccctgcgggccgaagataccgccgtgtattactgcgtgctgtggttcggagagggattcgacccgtggggacaaggaacactcgtgactgtgtcatccggcggaggcggcagcggtggcggcggttccggcggcggcggatctgacatcgtgttgacccagtcccctctgagcctgccggtcactcctggcgaaccagccagcatctcctgccggtcgagccagtccctcctgcactccaatgggtacaactacctcgattggtatctgcaaaagccgggccagagcccccagctgctgatctaccttgggtcaaaccgcgcttccggggtgcctgatagattctccgggtccgggagcggaaccgactttaccctgaaaatctcgagggtggaggccgaggacgtcggagtgtactactgcatgcaggcgctccagactcccctgaccttcggaggaggaacgaaggtcgacatcaaga

SEQ ID NO: 169 - DNA, 753 bp, Artificial Sequence
  source: /note="Description of Artificial Sequence: Synthetic polynucleotide"
caagtgcagctcgtggagtcaggcggaggactggtgcagcccgggggctccctgagactttcctgcgcggcatcgggttttaccttctcctcctatgctatgtcctgggtgcgccaggccccgggaaagggactggaatgggtgtccgcaatcagcggtagcgggggctcaacatactacgccgactccgtcaagggtcgcttcactatttcccgggacaactccaagaataccctgtacctccaaatgaacagcctcagggccgaggatactgccgtgtactactgcgccaaagtcggatacgatagctccggttactaccgggactactacggaatggacgtgtggggacagggcaccaccgtgaccgtgtcaagcggcggaggcggttcaggagggggaggctccggcggtggagggtccgaaatcgtcctgactcagtcgcctggcactctgtcgttgtccccgggggagcgcgctaccctgtcgtgtcgggcgtcgcagtccgtgtcgagctcctacctcgcgtggtaccagcagaagcccggacaggcccctagacttctgatctacggcacttcttcacgcgccaccgggatcagcgacaggttcagcggctccggctccgggaccgacttcaccctgaccattagccggctggagcctgaagatttcgccgtgtattactgccaacactacggaaactcgccgccaaagttcacgttcggacccggaaccaagctggaaatcaag

SEQ ID NO: 170 - DNA, 739 bp, Artificial Sequence
  source: /note="Description of Artificial Sequence: Synthetic polynucleotide"
gaagtccaactggtggagtccgggggagggctcgtgcagcccggaggcagccttcggctgtcgtgcgccgcctccgggttcacgttctcatcctacgcgatgtcgtgggtcagacaggcaccaggaaagggactggaatgggtgtccgccattagcggctccggcggtagcacctactatgccgactcagtgaagggaaggttcactatctcccgcgacaacagcaagaacaccctgtacctccaaatgaactctctgcgggccgaggataccgcggtgtactattgcgccaagatgggttggtccagcggatacttgggagccttcgacatttggggacagggcactactgtgaccgtgtcctccgggggtggcggatcgggaggcggcggctcgggtggagggggttccgaaatcgtgttgacccagtcaccgggaaccctctcgctgtccccgggagaacgggctacactgtcatgtagagcgtcccagtccgtggcttcctcgttcctggcctggtaccagcagaagccgggacaggcaccccgcctgctcatctacggagccagcggccgggcgaccggcatccctgaccgcttctccggttccggctcgggcaccgactttactctgaccattagcaggcttgagcccgaggattttgccgtgtactactgccaacactacggggggagccctcgcctgaccttcggaggcggaactaaggtcgatatcaaaa

SEQ ID NO: 171 - protein, 121 aa, Artificial Sequence
  source: /note="Description of Artificial Sequence: Synthetic polypeptide"
QVQLQESGPGLVKPSETLSLTCTVSGGSISSSYYYWGWIRQPPGKGLEWIGSIYYSGSAYYNPSLKSRVTISVDTSKNQFSLRLSSVTAADTAVYYCARHWQEWPDAFDIWGQGTMVTVSS

SEQ ID NO: 172 - protein, 123 aa, Artificial Sequence
  source: /note="Description of Artificial Sequence: Synthetic polypeptide"
QVNLRESGPALVKPTQTLTLTCTFSGFSLRTSGMCVSWIRQPPGKALEWLARIDWDEDKFYSTSLKTRLTISKDTSDNQVVLRMTNMDPADTATYYCARSGAGGTSATAFDIWGPGTMVTVSS

SEQ ID NO: 173 - protein, 119 aa, Artificial Sequence
  source: /note="Description of Artificial Sequence: Synthetic polypeptide"
EVQLVESGGGLVKPGGSLRLSCAASGFTFSSYSMNWVRQAPGKGLEWVSSISSSSSYIYYADSVKGRFTISRDNAKNSLYLQMNSLRAEDTAVYYCAKTIAAVYAFDIWGQGTTVTVSS

SEQ ID NO: 174 - protein, 117 aa, Artificial Sequence
  source: /note="Description of Artificial Sequence: Synthetic polypeptide"
EVQLVESGGGLVKPGGSLRLSCAASGFTFSDYYMSWIRQAPGKGLEWVSYISSSGSTIYYADSVKGRFTISRDNAKNSLYLQMNSLRAEDTAVYYCARDLRGAFDIWGQGTMVTVSS

SEQ ID NO: 175 - protein, 120 aa, Artificial Sequence
  source: /note="Description of Artificial Sequence: Synthetic polypeptide"
QVQLVQSGAEVKKPGASVKVSCKPSGYTVTSHYIHWVRRAPGQGLEWMGMINPSGGVTAYSQTLQGRVTMTSDTSSSTVYMELSSLRSEDTAMYYCAREGSGSGWYFDFWGRGTLVTVSS

SEQ ID NO: 176 - protein, 123 aa, Artificial Sequence
  source: /note="Description of Artificial Sequence: Synthetic polypeptide"
QVQLQESGPGLVKPSQTLSLTCTVSGGSISSGGYYWSWIRQHPGKGLEWIGYIYYSGSTYYNPSLKSRVTISVDTSKNQFSLKLSSVTAADTAVYYCARAGIAARLRGAFDIWGQGTMVTVSS

SEQ ID NO: 177 - protein, 129 aa, Artificial Sequence
  source: /note="Description of Artificial Sequence: Synthetic polypeptide"
QVQLVQSGAEVKKPGSSVKVSCKASGGTFSSYAISWVRQAPGQGLEWMGGIIPIFGTANYAQKFQGRVTITADESTSTAYMELSSLRSEDTAVYYCARRGGYQLLRWDVGLLRSAFDIWGQGTMVTVSS

SEQ ID NO: 178 - protein, 125 aa, Artificial Sequence
  source: /note="Description of Artificial Sequence: Synthetic polypeptide"
EVQLQQSGPGLVKPSQTLSLTCAISGDSVSSNSAAWNWIRQSPSRGLEWLGRTYYRSKWYSFYAISLKSRIIINPDTSKNQFSLQLKSVTPEDTAVYYCARSSPEGLFLYWFDPWGQGTLVTVSS

SEQ ID NO: 179 - protein, 118 aa, Artificial Sequence
  source: /note="Description of Artificial Sequence: Synthetic polypeptide"
EVQLVESGGGLVQPGGSLRLSCAASGFTFSSYAMSWVRQAPGKGLEWVSAISGSGGSTYYADSVKGRFTISRDNSKNTLYLQMNSLRAEDTAVYYCAKVEGSGSLDYWGQGTLVTVSS

SEQ ID NO: 180 - protein, 118 aa, Artificial Sequence
  source: /note="Description of Artificial Sequence: Synthetic polypeptide"
EVQLVETGGGLVQPGGSLRLSCAASGITFSRYPMSWVRQAPGKGLEWVSGISDSGVSTYYADSAKGRFTISRDNSKNTLFLQMSSLRDEDTAVYYCVTRAGSEASDIWGQGTMVTVSS

SEQ ID NO: 181 - protein, 124 aa, Artificial Sequence
  source: /note="Description of Artificial Sequence: Synthetic polypeptide"
QVQLVESGGGLVQPGGSLRLSCAASGFTFSSYAMSWVRQAPGKGLEWVSAISGSGGSTYYADSVKGRFTISRDNAKNSLYLQMNSLRAEDTAIYYCARATYKRELRYYYGMDVWGQGTMVTVSS

SEQ ID NO: 182 - protein, 124 aa, Artificial Sequence
  source: /note="Description of Artificial Sequence: Synthetic polypeptide"
EVQLVETGGGLVQPGGSLRLSCAASGFTFSSYAMSWVRQAPGKGLEWVSAISGSGGSTYYADSVKGRFTISRDNSKNTLYLQMNTLKAEDTAVYYCARATYKRELRYYYGMDVWGQGTTVTVSS

SEQ ID NO: 183 - protein, 117 aa, Artificial Sequence
  source: /note="Description of Artificial Sequence: Synthetic polypeptide"
EVQLVETGGGLVQPGRSLRLSCAASGFTFDDYAMHWVRQAPGKGLEWVSGISWNSGSIGYADSVKGRFTISRDNAKNSLYLQMNSLRDEDTAVYYCARVGKAVPDVWGQGTTVTVSS

SEQ ID NO: 184 - protein, 122 aa, Artificial Sequence
  source: /note="Description of Artificial Sequence: Synthetic polypeptide"
EVQLVESGGGLVQPGRSLRLSCTASGFTFDDYAMHWVRQRPGKGLEWVASINWKGNSLAYGDSVKGRFAISRDNAKNTVFLQMNSLRTEDTAVYYCASHQGVAYYNYAMDVWGRGTLVTVSS

SEQ ID NO: 185 - protein, 117 aa, Artificial Sequence
  source: /note="Description of Artificial Sequence: Synthetic polypeptide"
EVQLVESGGGLVQPGGSLRLSCAASGFTFSSYAMSWVRQAPGKGLEWVSAISGSGGSTYYADSVKGRFTISRDNSKNTLYLQMNSLRAEDTAVYYCAKVVRDGMDVWGQGTTVTVSS

SEQ ID NO: 186 - protein, 118 aa, Artificial Sequence
  source: /note="Description of Artificial Sequence: Synthetic polypeptide"
EVQLLESGGGLVQPGGSLRLSCAASGFTFSSYAMSWVRQAPGKGLEWVSAISGSGGSTYYADSVKGRFTISRDNSKNTLYLQMNSLRAEDTAVYYCAKIPQTGTFDYWGQGTLVTVSS

SEQ ID NO: 187 - protein, 124 aa, Artificial Sequence
  source: /note="Description of Artificial Sequence: Synthetic polypeptide"
EVQLVETGGGLVQPGGSLRLSCAASGFTFSSYAMSWVRQAPGKGLEWVSAISGSGGSTYYADSVKGRFTMSRENDKNSVFLQMNSLRVEDTGVYYCARANYKRELRYYYGMDVWGQGTMVTVSS

SEQ ID NO: 188 - protein, 120 aa, Artificial Sequence
  source: /note="Description of Artificial Sequence: Synthetic polypeptide"
EVQLLETGGGLVQPGGSLRLSCAASGFSFSSYAMSWVRQAPGKGLEWVSAISGSGGSTYYADSVKGRFTISRDNSKNTLYLQMNSLRAEDTAVYYCAKALVGATGAFDIWGQGTLVTVSS

SEQ ID NO: 189 - protein, 117 aa, Artificial Sequence
  source: /note="Description of Artificial Sequence: Synthetic polypeptide"
EVQLLESGGGLVQPGGSLRLSCAASGFTFSSYAMSWVRQAPGKGLEWVSAISGSGGSTYYADSVKGRFTISRDNSKNTLYLQMNSLRAEDTAVYYCVLWFGEGFDPWGQGTLVTVSS

SEQ ID NO: 190 - protein, 126 aa, Artificial Sequence
  source: /note="Description of Artificial Sequence: Synthetic polypeptide"
QVQLVESGGGLVQPGGSLRLSCAASGFTFSSYAMSWVRQAPGKGLEWVSAISGSGGSTYYADSVKGRFTISRDNSKNTLYLQMNSLRAEDTAVYYCAKVGYDSSGYYRDYYGMDVWGQGTTVTVSS

SEQ ID NO: 191 - protein, 122 aa, Artificial Sequence
  source: /note="Description of Artificial Sequence: Synthetic polypeptide"
EVQLVESGGGLVQPGGSLRLSCAASGFTFSSYAMSWVRQAPGKGLEWVSAISGSGGSTYYADSVKGRFTISRDNSKNTLYLQMNSLRAEDTAVYYCAKMGWSSGYLGAFDIWGQGTTVTVSS

SEQ ID NO: 192 - protein, 107 aa, Artificial Sequence
  source: /note="Description of Artificial Sequence: Synthetic polypeptide"
ETTLTQSPAFMSATPGDKVIISCKASQDIDDAMNWYQQKPGEAPLFIIQSATSPVPGIPPRFSGSGFGTDFSLTINNIESEDAAYYFCLQHDNFPLTFGQGTKLEIK

SEQ ID NO: 193 - protein, 107 aa, Artificial Sequence
  source: /note="Description of Artificial Sequence: Synthetic polypeptide"
DIQMTQSPSSLSASVGDRVTITCRASQDIYNNLAWFQLKPGSAPRSLMYAANKSQSGVPSRFSGSASGTDFTLTISSLQPEDFATYYCQHYYRFPYSFGQGTKLEIK

SEQ ID NO: 194 - protein, 112 aa, Artificial Sequence
  source: /note="Description of Artificial Sequence: Synthetic polypeptide"
EIVLTQSPLSLPVTPEEPASISCRSSQSLLHSNGYNYLDWYLQKPGQSPQLLIYLGSNRASGVPDRFSGSGSGTDFTLKISRVEAEDVGVYYCMQALQTPYTFGQGTKLEIK

SEQ ID NO: 195 - protein, 108 aa, Artificial Sequence
  source: /note="Description of Artificial Sequence: Synthetic polypeptide"
SYVLTQSPSVSAAPGYTATISCGGNNIGTKSVHWYQQKPGQAPLLVIRDDSVRPSKIPGRFSGSNSGNMATLTISGVQAGDEADFYCQVWDSDSEHVVFGGGTKLTVL

SEQ ID NO: 196 - protein, 106 aa, Artificial Sequence
  source: /note="Description of Artificial Sequence: Synthetic polypeptide"
SYVLTQPPSVSVSPGQTASITCSGDGLSKKYVSWYQQKAGQSPVVLISRDKERPSGIPDRFSGSNSADTATLTISGTQAMDEADYYCQAWDDTTVVFGGGTKLTVL

SEQ ID NO: 197 - protein, 107 aa, Artificial Sequence
  source: /note="Description of Artificial Sequence: Synthetic polypeptide"
DIVMTQSPSSVSASVGDRVIITCRASQGIRNWLAWYQQKPGKAPNLLIYAASNLQSGVPSRFSGSGSGADFTLTISSLQPEDVATYYCQKYNSAPFTFGPGTKVDIK

SEQ ID NO: 198 - protein, 109 aa, Artificial Sequence
  source: /note="Description of Artificial Sequence: Synthetic polypeptide"
SYVLTQPPSVSVAPGQTARITCGGNNIGSKSVHWYQQKPGQAPVLVLYGKNNRPSGVPDRFSGSRSGTTASLTITGAQAEDEADYYCSSRDSSGDHLRVFGTGTKVTVL

SEQ ID NO: 199 - protein, 108 aa, Artificial Sequence
  source: /note="Description of Artificial Sequence: Synthetic polypeptide"
SSELTQDPAVSVALGQTIRITCQGDSLGNYYATWYQQKPGQAPVLVIYGTNNRPSGIPDRFSASSSGNTASLTITGAQAEDEADYYCNSRDSSGHHLLFGTGTKVTVL

SEQ ID NO: 200 - protein, 113 aa, Artificial Sequence
  source: /note="Description of Artificial Sequence: Synthetic polypeptide"
EIVMTQSPGTLSLSPGERATLSCRASQSVSSAYLAWYQQKPGQPPRLLISGASTRATGIPDRFGGSGSGTDFTLTISRLEPEDFAVYYCQHYGSSFNGSSLFTFGQGTRLEIK

SEQ ID NO: 201 - protein, 108 aa, Artificial Sequence
  source: /note="Description of Artificial Sequence: Synthetic polypeptide"
EIVLTQSPATLSLSPGERATLSCRASQSVSNSLAWYQQKPGQAPRLLIYDASSRATGIPDRFSGSGSGTDFTLTISRLEPEDFAIYYCQQFGTSSGLTFGGGTKLEIK

SEQ ID NO: 202 - protein, 109 aa, Artificial Sequence
  source: /note="Description of Artificial Sequence: Synthetic polypeptide"
EIVMTQSPGTVSLSPGERATLSCRASQSVSSSFLAWYQQKPGQAPRLLIYGASSRATGIPDRFSGSGSGTDFTLTISRLEPEDSAVYYCQQYHSSPSWTFGQGTRLEIK

SEQ ID NO: 203 - protein, 109 aa, Artificial Sequence
  source: /note="Description of Artificial Sequence: Synthetic polypeptide"
EIVLTQSPSTLSLSPGESATLSCRASQSVSTTFLAWYQQKPGQAPRLLIYGSSNRATGIPDRFSGSGSGTDFTLTIRRLEPEDFAVYYCQQYHSSPSWTFGQGTKVEIK

SEQ ID NO: 204 - protein, 107 aa, Artificial Sequence
  source: /note="Description of Artificial Sequence: Synthetic polypeptide"
DIVMTQTPSSLSASVGDRVTITCRASQSISSYLNWYQQKPGKAPKLLIYAASSLQSGVPSRFSGSGSGTDFTLTISSLQPEDFATYYCQQSYSTPYSFGQGTRLEIK

SEQ ID NO: 205 - protein, 109 aa, Artificial Sequence
  source: /note="Description of Artificial Sequence: Synthetic polypeptide"
EIVLTQSPGTLSLSPGERATLSCRATQSIGSSFLAWYQQRPGQAPRLLIYGASQRATGIPDRFSGRGSGTDFTLTISRVEPEDSAVYYCQHYESSPSWTFGQGTKVEIK

SEQ ID NO: 206 - protein, 109 aa, Artificial Sequence
  source: /note="Description of Artificial Sequence: Synthetic polypeptide"
EIVLTQSPATLSLSPGERATLSCRASQSVSSSYLAWYQQKPGQAPRLLIYGASSRATGIPDRFSGNGSGTDFTLTISRLEPEDFAVYYCQQYGSPPRFTFGPGTKVDIK

SEQ ID NO: 207 - protein, 109 aa, Artificial Sequence
  source: /note="Description of Artificial Sequence: Synthetic polypeptide"
EIVLTQSPGTLSLSPGERATLSCRASQSVSSSYLAWYQQRPGQAPRLLIYGASSRATGIPDRFSGSGSGTDFTLTISRLEPEDFAVYYCQHYGSSPSWTFGQGTRLEIK

SEQ ID NO: 208 - protein, 109 aa, Artificial Sequence
  source: /note="Description of Artificial Sequence: Synthetic polypeptide"
EIVMTQSPGTLSLSPGESATLSCRASQRVASNYLAWYQHKPGQAPSLLISGASSRATGVPDRFSGSGSGTDFTLAISRLEPEDSAVYYCQHYDSSPSWTFGQGTKVEIK

SEQ ID NO: 209 - protein, 109 aa, Artificial Sequence
  source: /note="Description of Artificial Sequence: Synthetic polypeptide"
EIVLTQSPGTLSLSPGERATLSCRASQSLSSNFLAWYQQKPGQAPGLLIYGASNWATGTPDRFSGSGSGTDFTLTITRLEPEDFAVYYCQYYGTSPMYTFGQGTKVEIK

SEQ ID NO: 210 - protein, 112 aa, Artificial Sequence
  source: /note="Description of Artificial Sequence: Synthetic polypeptide"
DIVLTQSPLSLPVTPGEPASISCRSSQSLLHSNGYNYLDWYLQKPGQSPQLLIYLGSNRASGVPDRFSGSGSGTDFTLKISRVEAEDVGVYYCMQALQTPLTFGGGTKVDIK

SEQ ID NO: 211 - protein, 110 aa, Artificial Sequence
  source: /note="Description of Artificial Sequence: Synthetic polypeptide"
EIVLTQSPGTLSLSPGERATLSCRASQSVSSSYLAWYQQKPGQAPRLLIYGTSSRATGISDRFSGSGSGTDFTLTISRLEPEDFAVYYCQHYGNSPPKFTFGPGTKLEIK

SEQ ID NO: 212 - protein, 109 aa, Artificial Sequence
  source: /note="Description of Artificial Sequence: Synthetic polypeptide"
EIVLTQSPGTLSLSPGERATLSCRASQSVASSFLAWYQQKPGQAPRLLIYGASGRATGIPDRFSGSGSGTDFTLTISRLEPEDFAVYYCQHYGGSPRLTFGGGTKVDIK

SEQ ID NO: 213 - protein, 487 aa, Artificial Sequence
  source: /note="Description of Artificial Sequence: Synthetic polypeptide"
MALPVTALLLPLALLLHAARPQVQLQESGPGLVKPSETLSLTCTVSGGSISSSYYYWGWIRQPPGKGLEWIGSIYYSGSAYYNPSLKSRVTISVDTSKNQFSLRLSSVTAADTAVYYCARHWQEWPDAFDIWGQGTMVTVSSGGGGSGGGGSGGGGSETTLTQSPAFMSATPGDKVIISCKASQDIDDAMNWYQQKPGEAPLFIIQSATSPVPGIPPRFSGSGFGTDFSLTINNIESEDAAYYFCLQHDNFPLTFGQGTKLEIKTTTPAPRPPTPAPTIASQPLSLRPEACRPAAGGAVHTRGLDFACDIYIWAPLAGTCGVLLLSLVITLYCKRGRKKLLYIFKQPFMRPVQTTQEEDGCSCRFPEEEEGGCELRVKFSRSADAPAYKQGQNQLYNELNLGRREEYDVLDKRRGRDPEMGGKPRRKNPQEGLYNELQKDKMAEAYSEIGMKGERRRGKGHDGLYQGLSTATKDTYDALHMQALPPR

SEQ ID NO: 214 - protein, 489 aa, Artificial Sequence
  source: /note="Description of Artificial Sequence: Synthetic polypeptide"
MALPVTALLLPLALLLHAARPQVNLRESGPALVKPTQTLTLTCTFSGFSLRTSGMCVSWIRQPPGKALEWLARIDWDEDKFYSTSLKTRLTISKDTSDNQVVLRMTNMDPADTATYYCARSGAGGTSATAFDIWGPGTMVTVSSGGGGSGGGGSGGGGSDIQMTQSPSSLSASVGDRVTITCRASQDIYNNLAWFQLKPGSAPRSLMYAANKSQSGVPSRFSGSASGTDFTLTISSLQPEDFATYYCQHYYRFPYSFGQGTKLEIKTTTPAPRPPTPAPTIASQPLSLRPEACRPAAGGAVHTRGLDFACDIYIWAPLAGTCGVLLLSLVITLYCKRGRKKLLYIFKQPFMRPVQTTQEEDGCSCRFPEEEEGGCELRVKFSRSADAPAYKQGQNQLYNELNLGRREEYDVLDKRRGRDPEMGGKPRRKNPQEGLYNELQKDKMAEAYSEIGMKGERRRGKGHDGLYQGLSTATKDTYDALHMQALPPR

SEQ ID NO: 215 - protein, 490 aa, Artificial Sequence
  source: /note="Description of Artificial Sequence: Synthetic polypeptide"
MALPVTALLLPLALLLHAARPEVQLVESGGGLVKPGGSLRLSCAASGFTFSSYSMNWVRQAPGKGLEWVSSISSSSSYIYYADSVKGRFTISRDNAKNSLYLQMNSLRAEDTAVYYCAKTIAAVYAFDIWGQGTTVTVSSGGGGSGGGGSGGGGSEIVLTQSPLSLPVTPEEPASISCRSSQSLLHSNGYNYLDWYLQKPGQSPQLLIYLGSNRASGVPDRFSGSGSGTDFTLKISRVEAEDVGVYYCMQALQTPYTFGQGTKLEIKTTTPAPRPPTPAPTIASQPLSLRPEACRPAAGGAVHTRGLDFACDIYIWAPLAGTCGVLLLSLVITLYCKRGRKKLLYIFKQPFMRPVQTTQEEDGCSCRFPEEEEGGCELRVKFSRSADAPAYKQGQNQLYNELNLGRREEYDVLDKRRGRDPEMGGKPRRKNPQEGLYNELQKDKMAEAYSEIGMKGERRRGKGHDGLYQGLSTATKDTYDALHMQALPPR

SEQ ID NO: 216 - protein, 484 aa, Artificial Sequence
  source: /note="Description of Artificial Sequence: Synthetic polypeptide"
MALPVTALLLPLALLLHAARPEVQLVESGGGLVKPGGSLRLSCAASGFTFSDYYMSWIRQAPGKGLEWVSYISSSGSTIYYADSVKGRFTISRDNAKNSLYLQMNSLRAEDTAVYYCARDLRGAFDIWGQGTMVTVSSGGGGSGGGGSGGGGSSYVLTQSPSVSAAPGYTATISCGGNNIGTKSVHWYQQKPGQAPLLVIRDDSVRPSKIPGRFSGSNSGNMATLTISGVQAGDEADFYCQVWDSDSEHVVFGGGTKLTVLTTTPAPRPPTPAPTIASQPLSLRPEACRPAAGGAVHTRGLDFACDIYIWAPLAGTCGVLLLSLVITLYCKRGRKKLLYIFKQPFMRPVQTTQEEDGCSCRFPEEEEGGCELRVKFSRSADAPAYKQGQNQLYNELNLGRREEYDVLDKRRGRDPEMGGKPRRKNPQEGLYNELQKDKMAEAYSEIGMKGERRRGKGHDGLYQGLSTATKDTYDALHMQALPPR

SEQ ID NO: 217 - protein, 485 aa, Artificial Sequence
  source: /note="Description of Artificial Sequence: Synthetic polypeptide"
MALPVTALLLPLALLLHAARPQVQLVQSGAEVKKPGASVKVSCKPSGYTVTSHYIHWVRRAPGQGLEWMGMINPSGGVTAYSQTLQGRVTMTSDTSSSTVYMELSSLRSEDTAMYYCAREGSGSGWYFDFWGRGTLVTVSSGGGGSGGGGSGGGGSSYVLTQPPSVSVSPGQTASITCSGDGLSKKYVSWYQQKAGQSPVVLISRDKERPSGIPDRFSGSNSADTATLTISGTQAMDEADYYCQAWDDTTVVFGGGTKLTVLTTTPAPRPPTPAPTIASQPLSLRPEACRPAAGGAVHTRGLDFACDIYIWAPLAGTCGVLLLSLVITLYCKRGRKKLLYIFKQPFMRPVQTTQEEDGCSCRFPEEEEGGCELRVKFSRSADAPAYKQGQNQLYNELNLGRREEYDVLDKRRGRDPEMGGKPRRKNPQEGLYNELQKDKMAEAYSEIGMKGERRRGKGHDGLYQGLSTATKDTYDALHMQALPPR

SEQ ID NO: 218 - protein, 489 aa, Artificial Sequence
  source: /note="Description of Artificial Sequence: Synthetic polypeptide"
MALPVTALLLPLALLLHAARPQVQLQESGPGLVKPSQTLSLTCTVSGGSISSGGYYWSWIRQHPGKGLEWIGYIYYSGSTYYNPSLKSRVTISVDTSKNQFSLKLSSVTAADTAVYYCARAGIAARLRGAFDIWGQGTMVTVSSGGGGSGGGGSGGGGSDIVMTQSPSSVSASVGDRVIITCRASQGIRNWLAWYQQKPGKAPNLLIYAASNLQSGVPSRFSGSGSGADFTLTISSLQPEDVATYYCQKYNSAPFTFGPGTKVDIKTTTPAPRPPTPAPTIASQPLSLRPEACRPAAGGAVHTRGLDFACDIYIWAPLAGTCGVLLLSLVITLYCKRGRKKLLYIFKQPFMRPVQTTQEEDGCSCRFPEEEEGGCELRVKFSRSADAPAYKQGQNQLYNELNLGRREEYDVLDKRRGRDPEMGGKPRRKNPQEGLYNELQKDKMAEAYSEIGMKGERRRGKGHDGLYQGLSTATKDTYDALHMQALPPR

SEQ ID NO: 219 - protein, 497 aa, Artificial Sequence
  source: /note="Description of Artificial Sequence: Synthetic polypeptide"
MALPVTALLLPLALLLHAARPQVQLVQSGAEVKKPGSSVKVSCKASGGTFSSYAISWVRQAPGQGLEWMGGIIPIFGTANYAQKFQGRVTITADESTSTAYMELSSLRSEDTAVYYCARRGGYQLLRWDVGLLRSAFDIWGQGTMVTVSSGGGGSGGGGSGGGGSSYVLTQPPSVSVAPGQTARITCGGNNIGSKSVHWYQQKPGQAPVLVLYGKNNRPSGVPDRFSGSRSGTTASLTITGAQAEDEADYYCSSRDSSGDHLRVFGTGTKVTVLTTTPAPRPPTPAPTIASQPLSLRPEACRPAAGGAVHTRGLDFACDIYIWAPLAGTCGVLLLSLVITLYCKRGRKKLLYIFKQPFMRPVQTTQEEDGCSCRFPEEEEGGCELRVKFSRSADAPAYKQGQNQLYNELNLGRREEYDVLDKRRGRDPEMGGKPRRKNPQEGLYNELQKDKMAEAYSEIGMKGERRRGKGHDGLYQGLSTATKDTYDALHMQALPPR

SEQ ID NO: 220 - protein, 492 aa, Artificial Sequence
  source: /note="Description of Artificial Sequence: Synthetic polypeptide"
MALPVTALLLPLALLLHAARPEVQLQQSGPGLVKPSQTLSLTCAISGDSVSSNSAAWNWIRQSPSRGLEWLGRTYYRSKWYSFYAISLKSRIIINPDTSKNQFSLQLKSVTPEDTAVYYCARSSPEGLFLYWFDPWGQGTLVTVSSGGDGSGGGGSGGGGSSSELTQDPAVSVALGQTIRITCQGDSLGNYYATWYQQKPGQAPVLVIYGTNNRPSGIPDRFSASSSGNTASLTITGAQAEDEADYYCNSRDSSGHHLLFGTGTKVTVLTTTPAPRPPTPAPTIASQPLSLRPEACRPAAGGAVHTRGLDFACDIYIWAPLAGTCGVLLLSLVITLYCKRGRKKLLYIFKQPFMRPVQTTQEEDGCSCRFPEEEEGGCELRVKFSRSADAPAYKQGQNQLYNELNLGRREEYDVLDKRRGRDPEMGGKPRRKNPQEGLYNELQKDKMAEAYSEIGMKGERRRGKGHDGLYQGLSTATKDTYDALHMQALPPR

SEQ ID NO: 221 - protein, 490 aa, Artificial Sequence
  source: /note="Description of Artificial Sequence: Synthetic polypeptide"
MALPVTALLLPLALLLHAARPEVQLVESGGGLVQPGGSLRLSCAASGFTFSSYAMSWVRQAPGKGLEWVSAISGSGGSTYYADSVKGRFTISRDNSKNTLYLQMNSLRAEDTAVYYCAKVEGSGSLDYWGQGTLVTVSSGGGGSGGGGSGGGGSEIVMTQSPGTLSLSPGERATLSCRASQSVSSAYLAWYQQKPGQPPRLLISGASTRATGIPDRFGGSGSGTDFTLTISRLEPEDFAVYYCQHYGSSFNGSSLFTFGQGTRLEIKTTTPAPRPPTPAPTIASQPLSLRPEACRPAAGGAVHTRGLDFACDIYIWAPLAGTCGVLLLSLVITLYCKRGRKKLLYIFKQPFMRPVQTTQEEDGCSCRFPEEEEGGCELRVKFSRSADAPAYKQGQNQLYNELNLGRREEYDVLDKRRGRDPEMGGKPRRKNPQEGLYNELQKDKMAEAYSEIGMKGERRRGKGHDGLYQGLSTATKDTYDALHMQALPPR

SEQ ID NO: 222 - protein, 485 aa, Artificial Sequence
  source: /note="Description of Artificial Sequence: Synthetic polypeptide"
MALPVTALLLPLALLLHAARPEVQLVETGGGLVQPGGSLRLSCAASGITFSRYPMSWVRQAPGKGLEWVSGISDSGVSTYYADSAKGRFTISRDNSKNTLFLQMSSLRDEDTAVYYCVTRAGSEASDIWGQGTMVTVSSGGGGSGGGGSGGGGSEIVLTQSPATLSLSPGERATLSCRASQSVSNSLAWYQQKPGQAPRLLIYDASSRATGIPDRFSGSGSGTDFTLTISRLEPEDFAIYYCQQFGTSSGLTFGGGTKLEIKTTTPAPRPPTPAPTIASQPLSLRPEACRPAAGGAVHTRGLDFACDIYIWAPLAGTCGVLLLSLVITLYCKRGRKKLLYIFKQPFMRPVQTTQEEDGCSCRFPEEEEGGCELRVKFSRSADAPAYKQGQNQLYNELNLGRREEYDVLDKRRGRDPEMGGKPRRKNPQEGLYNELQKDKMAEAYSEIGMKGERRRGKGHDGLYQGLSTATKDTYDALHMQALPPR

SEQ ID NO: 223 - protein, 492 aa, Artificial Sequence
  source: /note="Description of Artificial Sequence: Synthetic polypeptide"
MALPVTALLLPLALLLHAARPQVQLVESGGGLVQPGGSLRLSCAASGFTFSSYAMSWVRQAPGKGLEWVSAISGSGGSTYYADSVKGRFTISRDNAKNSLYLQMNSLRAEDTAIYYCARATYKRELRYYYGMDVWGQGTMVTVSSGGGGSGGGGSGGGGSEIVMTQSPGTVSLSPGERATLSCRASQSVSSSFLAWYQQKPGQAPRLLIYGASSRATGIPDRFSGSGSGTDFTLTISRLEPEDSAVYYCQQYHSSPSWTFGQGTRLEIKTTTPAPRPPTPAPTIASQPLSLRPEACRPAAGGAVHTRGLDFACDIYIWAPLAGTCGVLLLSLVITLYCKRGRKKLLYIFKQPFMRPVQTTQEEDGCSCRFPEEEEGGCELRVKFSRSADAPAYKQGQNQLYNELNLGRREEYDVLDKRRGRDPEMGGKPRRKNPQEGLYNELQKDKMAEAYSEIGMKGERRRGKGHDGLYQGLSTATKDTYDALHMQALPPR

SEQ ID NO: 224 - protein, 492 aa, Artificial Sequence
  source: /note="Description of Artificial Sequence: Synthetic polypeptide"
MALPVTALLLPLALLLHAARPEVQLVETGGGLVQPGGSLRLSCAASGFTFSSYAMSWVRQAPGKGLEWVSAISGSGGSTYYADSVKGRFTISRDNSKNTLYLQMNTLKAEDTAVYYCARATYKRELRYYYGMDVWGQGTTVTVSSGGGGSGGGGSGGGGSEIVLTQSPSTLSLSPGESATLSCRASQSVSTTFLAWYQQKPGQAPRLLIYGSSNRATGIPDRFSGSGSGTDFTLTIRRLEPEDFAVYYCQQYHSSPSWTFGQGTKVEIKTTTPAPRPPTPAPTIASQPLSLRPEACRPAAGGAVHTRGLDFACDIYIWAPLAGTCGVLLLSLVITLYCKRGRKKLLYIFKQPFMRPVQTTQEEDGCSCRFPEEEEGGCELRVKFSRSADAPAYKQGQNQLYNELNLGRREEYDVLDKRRGRDPEMGGKPRRKNPQEGLYNELQKDKMAEAYSEIGMKGERRRGKGHDGLYQGLSTATKDTYDALHMQALPPR

SEQ ID NO: 225 - protein, 483 aa, Artificial Sequence
  source: /note="Description of Artificial Sequence: Synthetic polypeptide"
MALPVTALLLPLALLLHAARPEVQLVETGGGLVQPGRSLRLSCAASGFTFDDYAMHWVRQAPGKGLEWVSGISWNSGSIGYADSVKGRFTISRDNAKNSLYLQMNSLRDEDTAVYYCARVGKAVPDVWGQGTTVTVSSGGGGSGGGGSGGGGSDIVMTQTPSSLSASVGDRVTITCRASQSISSYLNWYQQKPGKAPKLLIYAASSLQSGVPSRFSGSGSGTDFTLTISSLQPEDFATYYCQQSYSTPYSFGQGTRLEIKTTTPAPRPPTPAPTIASQPLSLRPEACRPAAGGAVHTRGLDFACDIYIWAPLAGTCGVLLLSLVITLYCKRGRKKLLYIFKQPFMRPVQTTQEEDGCSCRFPEEEEGGCELRVKFSRSADAPAYKQGQNQLYNELNLGRREEYDVLDKRRGRDPEMGGKPRRKNPQEGLYNELQKDKMAEAYSEIGMKGERRRGKGHDGLYQGLSTATKDTYDALHMQALPPR

SEQ ID NO: 226 - protein, 490 aa, Artificial Sequence
  source: /note="Description of Artificial Sequence: Synthetic polypeptide"
MALPVTALLLPLALLLHAARPEVQLVESGGGLVQPGRSLRLSCTASGFTFDDYAMHWVRQRPGKGLEWVASINWKGNSLAYGDSVKGRFAISRDNAKNTVFLQMNSLRTEDTAVYYCASHQGVAYYNYAMDVWGRGTLVTVSSGGGGSGGGGSGGGGSEIVLTQSPGTLSLSPGERATLSCRATQSIGSSFLAWYQQRPGQAPRLLIYGASQRATGIPDRFSGRGSGTDFTLTISRVEPEDSAVYYCQHYESSPSWTFGQGTKVEIKTTTPAPRPPTPAPTIASQPLSLRPEACRPAAGGAVHTRGLDFACDIYIWAPLAGTCGVLLLSLVITLYCKRGRKKLLYIFKQPFMRPVQTTQEEDGCSCRFPEEEEGGCELRVKFSRSADAPAYKQGQNQLYNELNLGRREEYDVLDKRRGRDPEMGGKPRRKNPQEGLYNELQKDKMAEAYSEIGMKGERRRGKGHDGLYQGLSTATKDTYDALHMQALPPR

SEQ ID NO: 227 - protein, 485 aa, Artificial Sequence
  source: /note="Description of Artificial Sequence: Synthetic polypeptide"
MALPVTALLLPLALLLHAARPEVQLVESGGGLVQPGGSLRLSCAASGFTFSSYAMSWVRQAPGKGLEWVSAISGSGGSTYYADSVKGRFTISRDNSKNTLYLQMNSLRAEDTAVYYCAKVVRDGMDVWGQGTTVTVSSGGGGSGGGGSGGGGSEIVLTQSPATLSLSPGERATLSCRASQSVSSSYLAWYQQKPGQAPRLLIYGASSRATGIPDRFSGNGSGTDFTLTISRLEPEDFAVYYCQQYGSPPRFTFGPGTKVDIKTTTPAPRPPTPAPTIASQPLSLRPEACRPAAGGAVHTRGLDFACDIYIWAPLAGTCGVLLLSLVITLYCKRGRKKLLYIFKQPFMRPVQTTQEEDGCSCRFPEEEEGGCELRVKFSRSADAPAYKQGQNQLYNELNLGRREEYDVLDKRRGRDPEMGGKPRRKNPQEGLYNELQKDKMAEAYSEIGMKGERRRGKGHDGLYQGLSTATKDTYDALHMQALPPR

SEQ ID NO: 228 - protein, 486 aa, Artificial Sequence
  source: /note="Description of Artificial Sequence: Synthetic polypeptide"
MALPVTALLLPLALLLHAARPEVQLLESGGGLVQPGGSLRLSCAASGFTFSSYAMSWVRQAPGKGLEWVSAISGSGGSTYYADSVKGRFTISRDNSKNTLYLQMNSLRAEDTAVYYCAKIPQTGTFDYWGQGTLVTVSSGGGGSGGGGSGGGGSEIVLTQSPGTLSLSPGERATLSCRASQSVSSSYLAWYQQRPGQAPRLLIYGASSRATGIPDRFSGSGSGTDFTLTISRLEPEDFAVYYCQHYGSSPSWTFGQGTRLEIKTTTPAPRPPTPAPTIASQPLSLRPEACRPAAGGAVHTRGLDFACDIYIWAPLAGTCGVLLLSLVITLYCKRGRKKLLYIFKQPFMRPVQTTQEEDGCSCRFPEEEEGGCELRVKFSRSADAPAYKQGQNQLYNELNLGRREEYDVLDKRRGRDPEMGGKPRRKNPQEGLYNELQKDKMAEAYSEIGMKGERRRGKGHDGLYQGLSTATKDTYDALHMQALPPR

SEQ ID NO: 229 - protein, 492 aa, Artificial Sequence
  source: /note="Description of Artificial Sequence: Synthetic polypeptide"
MALPVTALLLPLALLLHAARPEVQLVETGGGLVQPGGSLRLSCAASGFTFSSYAMSWVRQAPGKGLEWVSAISGSGGSTYYADSVKGRFTMSRENDKNSVFLQMNSLRVEDTGVYYCARANYKRELRYYYGMDVWGQGTMVTVSSGGGGSGGGGSGGGGSEIVMTQSPGTLSLSPGESATLSCRASQRVASNYLAWYQHKPGQAPSLLISGASSRATGVPDRFSGSGSGTDFTLAISRLEPEDSAVYYCQHYDSSPSWTFGQGTKVEIKTTTPAPRPPTPAPTIASQPLSLRPEACRPAAGGAVHTRGLDFACDIYIWAPLAGTCGVLLLSLVITLYCKRGRKKLLYIFKQPFMRPVQTTQEEDGCSCRFPEEEEGGCELRVKFSRSADAPAYKQGQNQLYNELNLGRREEYDVLDKRRGRDPEMGGKPRRKNPQEGLYNELQKDKMAEAYSEIGMKGERRRGKGHDGLYQGLSTATKDTYDALHMQALPPR

SEQ ID NO: 230 - protein, 488 aa, Artificial Sequence
  source: /note="Description of Artificial Sequence: Synthetic polypeptide"
MALPVTALLLPLALLLHAARPEVQLLETGGGLVQPGGSLRLSCAASGFSFSSYAMSWVRQAPGKGLEWVSAISGSGGSTYYADSVKGRFTISRDNSKNTLYLQMNSLRAEDTAVYYCAKALVGATGAFDIWGQGTLVTVSSGGGGSGGGGSGGGGSEIVLTQSPGTLSLSPGERATLSCRASQSLSSNFLAWYQQKPGQAPGLLIYGASNWATGTPDRFSGSGSGTDFTLTITRLEPEDFAVYYCQYYGTSPMYTFGQGTKVEIKTTTPAPRPPTPAPTIASQPLSLRPEACRPAAGGAVHTRGLDFACDIYIWAPLAGTCGVLLLSLVITLYCKRGRKKLLYIFKQPFMRPVQTTQEEDGCSCRFPEEEEGGCELRVKFSRSADAPAYKQGQNQLYNELNLGRREEYDVLDKRRGRDPEMGGKPRRKNPQEGLYNELQKDKMAEAYSEIGMKGERRRGKGHDGLYQGLSTATKDTYDALHMQALPPR

SEQ ID NO: 231 - protein, 488 aa, Artificial Sequence
  source: /note="Description of Artificial Sequence: Synthetic polypeptide"
MALPVTALLLPLALLLHAARPEVQLLESGGGLVQPGGSLRLSCAASGFTFSSYAMSWVRQAPGKGLEWVSAISGSGGSTYYADSVKGRFTISRDNSKNTLYLQMNSLRAEDTAVYYCVLWFGEGFDPWGQGTLVTVSSGGGGSGGGGSGGGGSDIVLTQSPLSLPVTPGEPASISCRSSQSLLHSNGYNYLDWYLQKPGQSPQLLIYLGSNRASGVPDRFSGSGSGTDFTLKISRVEAEDVGVYYCMQALQTPLTFGGGTKVDIKTTTPAPRPPTPAPTIASQPLSLRPEACRPAAGGAVHTRGLDFACDIYIWAPLAGTCGVLLLSLVITLYCKRGRKKLLYIFKQPFMRPVQTTQEEDGCSCRFPEEEEGGCELRVKFSRSADAPAYKQGQNQLYNELNLGRREEYDVLDKRRGRDPEMGGKPRRKNPQEGLYNELQKDKMAEAYSEIGMKGERRRGKGHDGLYQGLSTATKDTYDALHMQALPPR

SEQ ID NO: 232 - protein, 495 aa, Artificial Sequence
  source: /note="Description of Artificial Sequence: Synthetic polypeptide"
MALPVTALLLPLALLLHAARPQVQLVESGGGLVQPGGSLRLSCAASGFTFSSYAMSWVRQAPGKGLEWVSAISGSGGSTYYADSVKGRFTISRDNSKNTLYLQMNSLRAEDTAVYYCAKVGYDSSGYYRDYYGMDVWGQGTTVTVSSGGGGSGGGGSGGGGSEIVLTQSPGTLSLSPGERATLSCRASQSVSSSYLAWYQQKPGQAPRLLIYGTSSRATGISDRFSGSGSGTDFTLTISRLEPEDFAVYYCQHYGNSPPKFTFGPGTKLEIKTTTPAPRPPTPAPTIASQPLSLRPEACRPAAGGAVHTRGLDFACDIYIWAPLAGTCGVLLLSLVITLYCKRGRKKLLYIFKQPFMRPVQTTQEEDGCSCRFPEEEEGGCELRVKFSRSADAPAYKQGQNQLYNELNLGRREEYDVLDKRRGRDPEMGGKPRRKNPQEGLYNELQKDKMAEAYSEIGMKGERRRGKGHDGLYQGLSTATKDTYDALHMQALPPR

SEQ ID NO: 233 - protein, 490 aa, Artificial Sequence
  source: /note="Description of Artificial Sequence: Synthetic polypeptide"
MALPVTALLLPLALLLHAARPEVQLVESGGGLVQPGGSLRLSCAASGFTFSSYAMSWVRQAPGKGLEWVSAISGSGGSTYYADSVKGRFTISRDNSKNTLYLQMNSLRAEDTAVYYCAKMGWSSGYLGAFDIWGQGTTVTVSSGGGGSGGGGSGGGGSEIVLTQSPGTLSLSPGERATLSCRASQSVASSFLAWYQQKPGQAPRLLIYGASGRATGIPDRFSGSGSGTDFTLTISRLEPEDFAVYYCQHYGGSPRLTFGGGTKVDIKTTTPAPRPPTPAPTIASQPLSLRPEACRPAAGGAVHTRGLDFACDIYIWAPLAGTCGVLLLSLVITLYCKRGRKKLLYIFKQPFMRPVQTTQEEDGCSCRFPEEEEGGCELRVKFSRSADAPAYKQGQNQLYNELNLGRREEYDVLDKRRGRDPEMGGKPRRKNPQEGLYNELQKDKMAEAYSEIGMKGERRRGKGHDGLYQGLSTATKDTYDALHMQALPPR

SEQ ID NO: 234 - DNA, 1461 bp, Artificial Sequence
  source: /note="Description of Artificial Sequence: Synthetic polynucleotide"
atggccctccctgtcaccgccctgctgcttccgctggctcttctgctccacgccgctcggccccaagtgcagcttcaggaaagcggaccgggcctggtcaagccatccgaaactctctccctgacttgcactgtgtctggcggttccatctcatcgtcgtactactactggggctggattaggcagccgcccggaaagggactggagtggatcggaagcatctactattccggctcggcgtactacaaccctagcctcaagtcgagagtgaccatctccgtggatacctccaagaaccagttttccctgcgcctgagctccgtgaccgccgctgacaccgccgtgtactactgtgctcggcattggcaggaatggcccgatgccttcgacatttggggccagggcactatggtcactgtgtcatccgggggtggaggcagcgggggaggagggtccggggggggaggttcagagacaaccttgacccagtcacccgcattcatgtccgccactccgggagacaaggtcatcatctcgtgcaaagcgtcccaggatatcgacgatgccatgaattggtaccagcagaagcctggcgaagcgccgctgttcattatccaatccgcaacctcgcccgtgcctggaatcccaccgcggttcagcggcagcggtttcggaaccgacttttccctgaccattaacaacattgagtccgaggacgccgcctactacttctgcctgcaacacgacaacttccctctcacgttcggccagggaaccaagctggaaatcaagaccactaccccagcaccgaggccacccaccccggctcctaccatcgcctcccagcctctgtccctgcgtccggaggcatgtagacccgcagctggtggggccgtgcatacccggggtcttgacttcgcctgcgatatctacatttgggcccctctggctggtacttgcggggtcctgctgctttcactcgtgatcactctttactgtaagcgcggtcggaagaagctgctgtacatctttaagcaacccttcatgaggcctgtgcagactactcaagaggaggacggctgttcatgccggttcccagaggaggaggaaggcggctgcgaactgcgcgtgaaattcagccgcagcgcagatgctccagcctacaagcaggggcagaaccagctctacaacgaactcaatcttggtcggagagaggagtacgacgtgctggacaagcggagaggacgggacccagaaatgggcgggaagccgcgcagaaagaatccccaagagggcctgtacaacgagctccaaaaggataagatggcagaagcctatagcgagattggtatgaaaggggaacgcagaagaggcaaaggccacgacggactgtaccagggactcagcaccgccaccaaggacacctatgacgctcttcacatgcaggccctgccgcctcgg

SEQ ID NO: 235 - DNA, 1467 bp, Artificial Sequence
  source: /note="Description of Artificial Sequence: Synthetic polynucleotide"
atggccctccctgtcaccgccctgctgcttccgctggctcttctgctccacgccgctcggccccaagtcaatctgcgcgaatccggccccgccttggtcaagcctacccagaccctcactctgacctgtactttctccggcttctccctgcggacttccgggatgtgcgtgtcctggatcagacagcctccgggaaaggccctggagtggctcgctcgcattgactgggatgaggacaagttctactccacctcactcaagaccaggctgaccatcagcaaagatacctctgacaaccaagtggtgctccgcatgaccaacatggacccagccgacactgccacttactactgcgcgaggagcggagcgggcggaacctccgccaccgccttcgatatttggggcccgggtaccatggtcaccgtgtcaagcggaggaggggggtccgggggcggcggttccgggggaggcggatcggacattcagatgactcagtcaccatcgtccctgagcgctagcgtgggcgacagagtgacaatcacttgccgggcatcccaggacatctataacaaccttgcgtggttccagctgaagcctggttccgcaccgcggtcacttatgtacgccgccaacaagagccagtcgggagtgccgtcccggttttccggttcggcctcgggaactgacttcaccctgacgatctccagcctgcaacccgaggatttcgccacctactactgccagcactactaccgctttccctactcgttcggacagggaaccaagctggaaatcaagaccactaccccagcaccgaggccacccaccccggctcctaccatcgcctcccagcctctgtccctgcgtccggaggcatgtagacccgcagctggtggggccgtgcatacccggggtcttgacttcgcctgcgatatctacatttgggcccctctggctggtacttgcggggtcctgctgctttcactcgtgatcactctttactgtaagcgcggtcggaagaagctgctgtacatctttaagcaacccttcatgaggcctgtgcagactactcaagaggaggacggctgttcatgccggttcccagaggaggaggaaggcggctgcgaactgcgcgtgaaattcagccgcagcgcagatgctccagcctacaagcaggggcagaaccagctctacaacgaactcaatcttggtcggagagaggagtacgacgtgctggacaagcggagaggacgggacccagaaatgggcgggaagccgcgcagaaagaatccccaagagggcctgtacaacgagctccaaaaggataagatggcagaagcctatagcgagattggtatgaaaggggaacgcagaagaggcaaaggccacgacggactgtaccagggactcagcaccgccaccaaggacacctatgacgctcttcacatgcaggccctgccgcctcgg

SEQ ID NO: 236 - DNA, 1470 bp, Artificial Sequence
  source: /note="Description of Artificial Sequence: Synthetic polynucleotide"
atggccctccctgtcaccgccctgctgcttccgctggctcttctgctccacgccgctcggcccgaagtgcagcttgtcgaatccggggggggactggtcaagccgggcggatcactgagactgtcctgcgccgcgagcggcttcacgttctcctcctactccatgaactgggtccgccaagcccccgggaagggactggaatgggtgtcctctatctcctcgtcgtcgtcctacatctactacgccgactccgtgaagggaagattcaccatttcccgcgacaacgcaaagaactcactgtacttgcaaatgaactcactccgggccgaagatactgctgtgtactattgcgccaagactattgccgccgtctacgctttcgacatctggggccagggaaccaccgtgactgtgtcgtccggtggtggtggctcgggcggaggaggaagcggcggcggggggtccgagattgtgctgacccagtcgccactgagcctccctgtgacccccgaggaacccgccagcatcagctgccggtccagccagtccctgctccactccaacggatacaattacctcgattggtaccttcagaagcctggacaaagcccgcagctgctcatctacttgggatcaaaccgcgcgtcaggagtgcctgaccggttctccggctcgggcagcggtaccgatttcaccctgaaaatctccagggtggaggcagaggacgtgggagtgtattactgtatgcaggcgctgcagactccgtacacatttgggcagggcaccaagctggagatcaagaccactaccccagcaccgaggccacccaccccggctcctaccatcgcctcccagcctctgtccctgcgtccggaggcatgtagacccgcagctggtggggccgtgcatacccggggtcttgacttcgcctgcgatatctacatttgggcccctctggctggtacttgcggggtcctgctgctttcactcgtgatcactctttactgtaagcgcggtcggaagaagctgctgtacatctttaagcaacccttcatgaggcctgtgcagactactcaagaggaggacggctgttcatgccggttcccagaggaggaggaaggcggctgcgaactgcgcgtgaaattcagccgcagcgcagatgctccagcctacaagcaggggcagaaccagctctacaacgaactcaatcttggtcggagagaggagtacgacgtgctggacaagcggagaggacgggacccagaaatgggcgggaagccgcgcagaaagaatccccaagagggcctgtacaacgagctccaaaaggataagatggcagaagcctatagcgagattggtatgaaaggggaacgcagaagaggcaaaggccacgacggactgtaccagggactcagcaccgccaccaaggacacctatgacgctcttcacatgcaggccctgccgcctcgg

SEQ ID NO: 237 - DNA, 1452 bp, Artificial Sequence
  source: /note="Description of Artificial Sequence: Synthetic polynucleotide"
atggccctccctgtcaccgccctgctgcttccgctggctcttctgctccacgccgctcggcccgaagtccagctcgtggagtccggcggaggccttgtgaagcctggaggttcgctgagactgtcctgcgccgcctccggcttcaccttctccgactactacatgtcctggatcagacaggccccgggaaagggcctggaatgggtgtcctacatctcgtcatcgggcagcactatctactacgcggactcagtgaaggggcggttcaccatttcccgggataacgcgaagaactcgctgtatctgcaaatgaactcactgagggccgaggacaccgccgtgtactactgcgcccgcgatctccgcggggcatttgacatctggggacagggaaccatggtcacagtgtccagcggagggggaggatcgggtggcggaggttccgggggtggaggctcctcctacgtgctgactcagagcccaagcgtcagcgctgcgcccggttacacggcaaccatctcctgtggcggaaacaacattgggaccaagtctgtgcactggtatcagcagaagccgggccaagctcccctgttggtgatccgcgatgactccgtgcggcctagcaaaattccgggacggttctccggctccaacagcggcaatatggccactctcaccatctcgggagtgcaggccggagatgaagccgacttctactgccaagtctgggactcagactccgagcatgtggtgttcgggggcggaaccaagctgactgtgctcaccactaccccagcaccgaggccacccaccccggctcctaccatcgcctcccagcctctgtccctgcgtccggaggcatgtagacccgcagctggtggggccgtgcatacccggggtcttgacttcgcctgcgatatctacatttgggcccctctggctggtacttgcggggtcctgctgctttcactcgtgatcactctttactgtaagcgcggtcggaagaagctgctgtacatctttaagcaacccttcatgaggcctgtgcagactactcaagaggaggacggctgttcatgccggttcccagaggaggaggaaggcggctgcgaactgcgcgtgaaattcagccgcagcgcagatgctccagcctacaagcaggggcagaaccagctctacaacgaactcaatcttggtcggagagaggagtacgacgtgctggacaagcggagaggacgggacccagaaatgggcgggaagccgcgcagaaagaatccccaagagggcctgtacaacgagctccaaaaggataagatggcagaagcctatagcgagattggtatgaaaggggaacgcagaagaggcaaaggccacgacggactgtaccagggactcagcaccgccaccaaggacacctatgacgctcttcacatgcaggccctgccgcctcgg

SEQ ID NO: 238 - DNA, 1455 bp, Artificial Sequence
  source: /note="Description of Artificial Sequence: Synthetic polynucleotide"
atggccctccctgtcaccgccctgctgcttccgctggctcttctgctccacgccgctcggccccaagtgcagctggtgcagagcggggccgaagtcaagaagccgggagcctccgtgaaagtgtcctgcaagccttcgggatacaccgtgacctcccactacattcattgggtccgccgcgcccccggccaaggactcgagtggatgggcatgatcaaccctagcggcggagtgaccgcgtacagccagacgctgcagggacgcgtgactatgacctcggatacctcctcctccaccgtctatatggaactgtccagcctgcggtccgaggataccgccatgtactactgcgcccgggaaggatcaggctccgggtggtatttcgacttctggggaagaggcaccctcgtgactgtgtcatctgggggagggggttccggtggtggcggatcgggaggaggcggttcatcctacgtgctgacccagccaccctccgtgtccgtgagccccggccagactgcatcgattacatgtagcggcgacggcctctccaagaaatacgtgtcgtggtaccagcagaaggccggacagagcccggtggtgctgatctcaagagataaggagcggcctagcggaatcccggacaggttctcgggttccaactccgcggacactgctactctgaccatctcggggacccaggctatggacgaagccgattactactgccaagcctgggacgacactactgtcgtgtttggagggggcaccaagttgaccgtccttaccactaccccagcaccgaggccacccaccccggctcctaccatcgcctcccagcctctgtccctgcgtccggaggcatgtagacccgcagctggtggggccgtgcatacccggggtcttgacttcgcctgcgatatctacatttgggcccctctggctggtacttgcggggtcctgctgctttcactcgtgatcactctttactgtaagcgcggtcggaagaagctgctgtacatctttaagcaacccttcatgaggcctgtgcagactactcaagaggaggacggctgttcatgccggttcccagaggaggaggaaggcggctgcgaactgcgcgtgaaattcagccgcagcgcagatgctccagcctacaagcaggggcagaaccagctctacaacgaactcaatcttggtcggagagaggagtacgacgtgctggacaagcggagaggacgggacccagaaatgggcgggaagccgcgcagaaagaatccccaagagggcctgtacaacgagctccaaaaggataagatggcagaagcctatagcgagattggtatgaaaggggaacgcagaagaggcaaaggccacgacggactgtaccagggactcagcaccgccaccaaggacacctatgacgctcttcacatgcaggccctgccgcctcgg

SEQ ID NO: 239 - DNA, 1467 bp, Artificial Sequence
  source: /note="Description of Artificial Sequence: Synthetic polynucleotide"
atggccctccctgtcaccgccctgctgcttccgctggctcttctgctccacgccgctcggccccaagtgcagcttcaggagagcggcccgggactcgtgaagccgtcccagaccctgtccctgacttgcaccgtgtcgggaggaagcatctcgagcggaggctactattggtcgtggattcggcagcaccctggaaagggcctggaatggatcggctacatctactactccggctcgacctactacaacccatcgctgaagtccagagtgacaatctcagtggacacgtccaagaatcagttcagcctgaagctctcttccgtgactgcggccgacaccgccgtgtactactgcgcacgcgctggaattgccgcccggctgaggggtgccttcgacatttggggacagggcaccatggtcaccgtgtcctccggcggcggaggttccgggggtggaggctcaggaggaggggggtccgacatcgtcatgactcagtcgccctcaagcgtcagcgcgtccgtcggggacagagtgatcatcacctgtcgggcgtcccagggaattcgcaactggctggcctggtatcagcagaagcccggaaaggcccccaacctgttgatctacgccgcctcaaacctccaatccggggtgccgagccgcttcagcggctccggttcgggtgccgatttcactctgaccatctcctccctgcaacctgaagatgtggctacctactactgccaaaagtacaactccgcaccttttactttcggaccggggaccaaagtggacattaagaccactaccccagcaccgaggccacccaccccggctcctaccatcgcctcccagcctctgtccctgcgtccggaggcatgtagacccgcagctggtggggccgtgcatacccggggtcttgacttcgcctgcgatatctacatttgggcccctctggctggtacttgcggggtcctgctgctttcactcgtgatcactctttactgtaagcgcggtcggaagaagctgctgtacatctttaagcaacccttcatgaggcctgtgcagactactcaagaggaggacggctgttcatgccggttcccagaggaggaggaaggcggctgcgaactgcgcgtgaaattcagccgcagcgcagatgctccagcctacaagcaggggcagaaccagctctacaacgaactcaatcttggtcggagagaggagtacgacgtgctggacaagcggagaggacgggacccagaaatgggcgggaagccgcgcagaaagaatccccaagagggcctgtacaacgagctccaaaaggataagatggcagaagcctatagcgagattggtatgaaaggggaacgcagaagaggcaaaggccacgacggactgtaccagggactcagcaccgccaccaaggacacctatgacgctcttcacatgcaggccctgccgcctcgg

SEQ ID NO: 240 - DNA, 1491 bp, Artificial Sequence
  source: /note="Description of Artificial Sequence: Synthetic polynucleotide"
atggccctccctgtcaccgccctgctgcttccgctggctcttctgctccacgccgctcggccccaagtgcagctggtccagtcgggcgccgaggtcaagaagcccgggagctctgtgaaagtgtcctgcaaggcctccgggggcacctttagctcctacgccatctcctgggtccgccaagcaccgggtcaaggcctggagtggatggggggaattatccctatcttcggcactgccaactacgcccagaagttccagggacgcgtgaccattaccgcggacgaatccacctccaccgcttatatggagctgtccagcttgcgctcggaagataccgccgtgtactactgcgcccggaggggtggataccagctgctgagatgggacgtgggcctcctgcggtcggcgttcgacatctggggccagggcactatggtcactgtgtccagcggaggaggcggatcgggaggcggcggatcagggggaggcggttccagctacgtgcttactcaacccccttcggtgtccgtggccccgggacagaccgccagaatcacttgcggaggaaacaacattgggtccaagagcgtgcattggtaccagcagaagccaggacaggcccctgtgctggtgctctacgggaagaacaatcggcccagcggagtgccggacaggttctcgggttcacgctccggtacaaccgcttcactgactatcaccggggcccaggcagaggatgaagcggactactactgttcctcccgggattcatccggcgaccacctccgggtgttcggaaccggaacgaaggtcaccgtgctgaccactaccccagcaccgaggccacccaccccggctcctaccatcgcctcccagcctctgtccctgcgtccggaggcatgtagacccgcagctggtggggccgtgcatacccggggtcttgacttcgcctgcgatatctacatttgggcccctctggctggtacttgcggggtcctgctgctttcactcgtgatcactctttactgtaagcgcggtcggaagaagctgctgtacatctttaagcaacccttcatgaggcctgtgcagactactcaagaggaggacggctgttcatgccggttcccagaggaggaggaaggcggctgcgaactgcgcgtgaaattcagccgcagcgcagatgctccagcctacaagcaggggcagaaccagctctacaacgaactcaatcttggtcggagagaggagtacgacgtgctggacaagcggagaggacgggacccagaaatgggcgggaagccgcgcagaaagaatccccaagagggcctgtacaacgagctccaaaaggataagatggcagaagcctatagcgagattggtatgaaaggggaacgcagaagaggcaaaggccacgacggactgtaccagggactcagcaccgccaccaaggacacctatgacgctcttcacatgcaggccctgccgcctcgg

SEQ ID NO: 241 - DNA, 1476 bp, Artificial Sequence
  source: /note="Description of Artificial Sequence: Synthetic polynucleotide"
atggccctccctgtcaccgccctgctgcttccgctggctcttctgctccacgccgctcggcccgaagtgcagctccaacagtcaggaccggggctcgtgaagccatcccagaccctgtccctgacttgtgccatctcgggagatagcgtgtcatcgaactccgccgcctggaactggattcggcagagcccgtcccgcggactggagtggcttggaaggacctactaccggtccaagtggtactctttctacgcgatctcgctgaagtcccgcattatcattaaccctgatacctccaagaatcagttctccctccaactgaaatccgtcacccccgaggacacagcagtgtattactgcgcacggagcagccccgaaggactgttcctgtattggtttgacccctggggccaggggactcttgtgaccgtgtcgagcggcggagatgggtccggtggcggtggttcggggggcggcggatcatcatccgaactgacccaggacccggctgtgtccgtggcgctgggacaaaccatccgcattacgtgccagggagactccctgggcaactactacgccacttggtaccagcagaagccgggccaagcccctgtgttggtcatctacgggaccaacaacagaccttccggcatccccgaccggttcagcgcttcgtcctccggcaacactgccagcctgaccatcactggagcgcaggccgaagatgaggccgactactactgcaacagcagagactcctcgggtcatcacctcttgttcggaactggaaccaaggtcaccgtgctgaccactaccccagcaccgaggccacccaccccggctcctaccatcgcctcccagcctctgtccctgcgtccggaggcatgtagacccgcagctggtggggccgtgcatacccggggtcttgacttcgcctgcgatatctacatttgggcccctctggctggtacttgcggggtcctgctgctttcactcgtgatcactctttactgtaagcgcggtcggaagaagctgctgtacatctttaagcaacccttcatgaggcctgtgcagactactcaagaggaggacggctgttcatgccggttcccagaggaggaggaaggcggctgcgaactgcgcgtgaaattcagccgcagcgcagatgctccagcctacaagcaggggcagaaccagctctacaacgaactcaatcttggtcggagagaggagtacgacgtgctggacaagcggagaggacgggacccagaaatgggcgggaagccgcgcagaaagaatccccaagagggcctgtacaacgagctccaaaaggataagatggcagaagcctatagcgagattggtatgaaaggggaacgcagaagaggcaaaggccacgacggactgtaccagggactcagcaccgccaccaaggacacctatgacgctcttcacatgcaggccctgccgcctcgg

SEQ ID NO: 242 - DNA, 1470 bp, Artificial Sequence
  source: /note="Description of Artificial Sequence: Synthetic polynucleotide"
atggccctccctgtcaccgccctgctgcttccgctggctcttctgctccacgccgctcggcccgaagtgcagctcgtggagtcaggaggcggcctggtccagccgggagggtcccttagactgtcatgcgccgcaagcggattcactttctcctcctatgccatgagctgggtccgccaagcccccggaaagggactggaatgggtgtccgccatctcggggtctggaggctcaacttactacgctgactccgtgaagggacggttcaccattagccgcgacaactccaagaacaccctctacctccaaatgaactccctgcgggccgaggataccgccgtctactactgcgccaaagtggaaggttcaggatcgctggactactggggacagggtactctcgtgaccgtgtcatcgggcggaggaggttccggcggtggcggctccggcggcggagggtcggagatcgtgatgacccagagccctggtactctgagcctttcgccgggagaaagggccaccctgtcctgccgcgcttcccaatccgtgtcctccgcgtacttggcgtggtaccagcagaagccgggacagccccctcggctgctgatcagcggggccagcacccgggcaaccggaatcccagacagattcgggggttccggcagcggcacagatttcaccctgactatttcgaggttggagcccgaggactttgcggtgtattactgtcagcactacgggtcgtcctttaatggctccagcctgttcacgttcggacaggggacccgcctggaaatcaagaccactaccccagcaccgaggccacccaccccggctcctaccatcgcctcccagcctctgtccctgcgtccggaggcatgtagacccgcagctggtggggccgtgcatacccggggtcttgacttcgcctgcgatatctacatttgggcccctctggctggtacttgcggggtcctgctgctttcactcgtgatcactctttactgtaagcgcggtcggaagaagctgctgtacatctttaagcaacccttcatgaggcctgtgcagactactcaagaggaggacggctgttcatgccggttcccagaggaggaggaaggcggctgcgaactgcgcgtgaaattcagccgcagcgcagatgctccagcctacaagcaggggcagaaccagctctacaacgaactcaatcttggtcggagagaggagtacgacgtgctggacaagcggagaggacgggacccagaaatgggcgggaagccgcgcagaaagaatccccaagagggcctgtacaacgagctccaaaaggataagatggcagaagcctatagcgagattggtatgaaaggggaacgcagaagaggcaaaggccacgacggactgtaccagggactcagcaccgccaccaaggacacctatgacgctcttcacatgcaggccctgccgcctcgg

SEQ ID NO: 243 - DNA, 1455 bp, Artificial Sequence
  source: /note="Description of Artificial Sequence: Synthetic polynucleotide"
atggccctccctgtcaccgccctgctgcttccgctggctcttctgctccacgccgctcggcccgaagtgcaactggtggaaaccggtggcggcctggtgcagcctggaggatcattgaggctgtcatgcgcggccagcggtattaccttctcccggtaccccatgtcctgggtcagacaggccccggggaaagggcttgaatgggtgtccgggatctcggactccggtgtcagcacttactacgccgactccgccaagggacgcttcaccatttcccgggacaactcgaagaacaccctgttcctccaaatgagctccctccgggacgaggatactgcagtgtactactgcgtgacccgcgccgggtccgaggcgtctgacatttggggacagggcactatggtcaccgtgtcgtccggcggagggggctcgggaggcggtggcagcggaggaggagggtccgagatcgtgctgacccaatccccggccaccctctcgctgagccctggagaaagggcaaccttgtcctgtcgcgcgagccagtccgtgagcaactccctggcctggtaccagcagaagcccggacaggctccgagacttctgatctacgacgcttcgagccgggccactggaatccccgaccgcttttcggggtccggctcaggaaccgatttcaccctgacaatctcacggctggagccagaggatttcgccatctattactgccagcagttcggtacttcctccggcctgactttcggaggcggcacgaagctcgaaatcaagaccactaccccagcaccgaggccacccaccccggctcctaccatcgcctcccagcctctgtccctgcgtccggaggcatgtagacccgcagctggtggggccgtgcatacccggggtcttgacttcgcctgcgatatctacatttgggcccctctggctggtacttgcggggtcctgctgctttcactcgtgatcactctttactgtaagcgcggtcggaagaagctgctgtacatctttaagcaacccttcatgaggcctgtgcagactactcaagaggaggacggctgttcatgccggttcccagaggaggaggaaggcggctgcgaactgcgcgtgaaattcagccgcagcgcagatgctccagcctacaagcaggggcagaaccagctctacaacgaactcaatcttggtcggagagaggagtacgacgtgctggacaagcggagaggacgggacccagaaatgggcgggaagccgcgcagaaagaatccccaagagggcctgtacaacgagctccaaaaggataagatggcagaagcctatagcgagattggtatgaaaggggaacgcagaagaggcaaaggccacgacggactgtaccagggactcagcaccgccaccaaggacacctatgacgctcttcacatgcaggccctgccgcctcgg

SEQ ID NO: 244 - DNA, 1476 bp, Artificial Sequence
  source: /note="Description of Artificial Sequence: Synthetic polynucleotide"
atggccctccctgtcaccgccctgctgcttccgctggctcttctgctccacgccgctcggccccaagtgcagctcgtggaatcgggtggcggactggtgcagccggggggctcacttagactgtcctgcgcggccagcggattcactttctcctcctacgccatgtcctgggtcagacaggcccctggaaagggcctggaatgggtgtccgcaatcagcggcagcggcggctcgacctattacgcggattcagtgaagggcagattcaccatttcccgggacaacgccaagaactccttgtaccttcaaatgaactccctccgcgcggaagataccgcaatctactactgcgctcgggccacttacaagagggaactgcgctactactacgggatggacgtctggggccagggaaccatggtcaccgtgtccagcggaggaggaggatcgggaggaggcggtagcgggggtggagggtcggagatcgtgatgacccagtcccccggcactgtgtcgctgtcccccggcgaacgggccaccctgtcatgtcgggccagccagtcagtgtcgtcaagcttcctcgcctggtaccagcagaaaccgggacaagctccccgcctgctgatctacggagccagcagccgggccaccggtattcctgaccggttctccggttcggggtccgggaccgactttactctgactatctctcgcctcgagccagaggactccgccgtgtattactgccagcagtaccactcctccccgtcctggacgttcggacagggcacaaggctggagattaagaccactaccccagcaccgaggccacccaccccggctcctaccatcgcctcccagcctctgtccctgcgtccggaggcatgtagacccgcagctggtggggccgtgcatacccggggtcttgacttcgcctgcgatatctacatttgggcccctctggctggtacttgcggggtcctgctgctttcactcgtgatcactctttactgtaagcgcggtcggaagaagctgctgtacatctttaagcaacccttcatgaggcctgtgcagactactcaagaggaggacggctgttcatgccggttcccagaggaggaggaaggcggctgcgaactgcgcgtgaaattcagccgcagcgcagatgctccagcctacaagcaggggcagaaccagctctacaacgaactcaatcttggtcggagagaggagtacgacgtgctggacaagcggagaggacgggacccagaaatgggcgggaagccgcgcagaaagaatccccaagagggcctgtacaacgagctccaaaaggataagatggcagaagcctatagcgagattggtatgaaaggggaacgcagaagaggcaaaggccacgacggactgtaccagggactcagcaccgccaccaaggacacctatgacgctcttcacatgcaggccctgccgcctcgg

SEQ ID NO: 245 - DNA, 1476 bp, Artificial Sequence
  source: /note="Description of Artificial Sequence: Synthetic polynucleotide"
atggccctccctgtcaccgccctgctgcttccgctggctcttctgctccacgccgctcggcccgaggtgcagcttgtggaaaccggtggcggactggtgcagcccggaggaagcctcaggctgtcctgcgccgcgtccggcttcaccttctcctcgtacgccatgtcctgggtccgccaggcccccggaaagggcctggaatgggtgtccgccatctctggaagcggaggttccacgtactacgcggacagcgtcaagggaaggttcacaatctcccgcgataattcgaagaacactctgtaccttcaaatgaacaccctgaaggccgaggacactgctgtgtactactgcgcacgggccacctacaagagagagctccggtactactacggaatggacgtctggggccagggaactactgtgaccgtgtcctcgggagggggtggctccggggggggcggctccggcggaggcggttccgagattgtgctgacccagtcaccttcaactctgtcgctgtccccgggagagagcgctactctgagctgccgggccagccagtccgtgtccaccaccttcctcgcctggtatcagcagaagccggggcaggcaccacggctcttgatctacgggtcaagcaacagagcgaccggaattcctgaccgcttctcggggagcggttcaggcaccgacttcaccctgactatccggcgcctggaacccgaagatttcgccgtgtattactgtcaacagtaccactcctcgccgtcctggacctttggccaaggaaccaaagtggaaatcaagaccactaccccagcaccgaggccacccaccccggctcctaccatcgcctcccagcctctgtccctgcgtccggaggcatgtagacccgcagctggtggggccgtgcatacccggggtcttgacttcgcctgcgatatctacatttgggcccctctggctggtacttgcggggtcctgctgctttcactcgtgatcactctttactgtaagcgcggtcggaagaagctgctgtacatctttaagcaacccttcatgaggcctgtgcagactactcaagaggaggacggctgttcatgccggttcccagaggaggaggaaggcggctgcgaactgcgcgtgaaattcagccgcagcgcagatgctccagcctacaagcaggggcagaaccagctctacaacgaactcaatcttggtcggagagaggagtacgacgtgctggacaagcggagaggacgggacccagaaatgggcgggaagccgcgcagaaagaatccccaagagggcctgtacaacgagctccaaaaggataagatggcagaagcctatagcgagattggtatgaaaggggaacgcagaagaggcaaaggccacgacggactgtaccagggactcagcaccgccaccaaggacacctatgacgctcttcacatgcaggccctgccgcctcgg

SEQ ID NO: 246 - DNA, 1449 bp, Artificial Sequence
  source: /note="Description of Artificial Sequence: Synthetic polynucleotide"
atggccctccctgtcaccgccctgctgcttccgctggctcttctgctccacgccgctcggcccgaagtgcagctcgtggaaactggaggtggactcgtgcagcctggacggtcgctgcggctgagctgcgctgcatccggcttcaccttcgacgattatgccatgcactgggtcagacaggcgccagggaagggacttgagtgggtgtccggtatcagctggaatagcggctcaatcggatacgcggactccgtgaagggaaggttcaccatttcccgcgacaacgccaagaactccctgtacttgcaaatgaacagcctccgggatgaggacactgccgtgtactactgcgcccgcgtcggaaaagctgtgcccgacgtctggggccagggaaccactgtgaccgtgtccagcggcgggggtggatcgggcggtggagggtccggtggagggggctcagatattgtgatgacccagaccccctcgtccctgtccgcctcggtcggcgaccgcgtgactatcacatgtagagcctcgcagagcatctccagctacctgaactggtatcagcagaagccggggaaggccccgaagctcctgatctacgcggcatcatcactgcaatcgggagtgccgagccggttttccgggtccggctccggcaccgacttcacgctgaccatttcttccctgcaacccgaggacttcgccacttactactgccagcagtcctactccaccccttactccttcggccaaggaaccaggctggaaatcaagaccactaccccagcaccgaggccacccaccccggctcctaccatcgcctcccagcctctgtccctgcgtccggaggcatgtagacccgcagctggtggggccgtgcatacccggggtcttgacttcgcctgcgatatctacatttgggcccctctggctggtacttgcggggtcctgctgctttcactcgtgatcactctttactgtaagcgcggtcggaagaagctgctgtacatctttaagcaacccttcatgaggcctgtgcagactactcaagaggaggacggctgttcatgccggttcccagaggaggaggaaggcggctgcgaactgcgcgtgaaattcagccgcagcgcagatgctccagcctacaagcaggggcagaaccagctctacaacgaactcaatcttggtcggagagaggagtacgacgtgctggacaagcggagaggacgggacccagaaatgggcgggaagccgcgcagaaagaatccccaagagggcctgtacaacgagctccaaaaggataagatggcagaagcctatagcgagattggtatgaaaggggaacgcagaagaggcaaaggccacgacggactgtaccagggactcagcaccgccaccaaggacacctatgacgctcttcacatgcaggccctgccgcctcgg

SEQ ID NO: 247 - DNA, 1470 bp, Artificial Sequence
  source: /note="Description of Artificial Sequence: Synthetic polynucleotide"
atggccctccctgtcaccgccctgctgcttccgctggctcttctgctccacgccgctcggcccgaagtgcagctcgtggagagcgggggaggattggtgcagcccggaaggtccctgcggctctcctgcactgcgtctggcttcaccttcgacgactacgcgatgcactgggtcagacagcgcccgggaaagggcctggaatgggtcgcctcaatcaactggaagggaaactccctggcctatggcgacagcgtgaagggccgcttcgccatttcgcgcgacaacgccaagaacaccgtgtttctgcaaatgaattccctgcggaccgaggataccgctgtgtactactgcgccagccaccagggcgtggcatactataactacgccatggacgtgtggggaagagggacgctcgtcaccgtgtcctccgggggcggtggatcgggtggaggaggaagcggtggcgggggcagcgaaatcgtgctgactcagagcccgggaactctttcactgtccccgggagaacgggccactctctcgtgccgggccacccagtccatcggctcctccttccttgcctggtaccagcagaggccaggacaggcgccccgcctgctgatctacggtgcttcccaacgcgccactggcattcctgaccggttcagcggcagagggtcgggaaccgatttcacactgaccatttcccgggtggagcccgaagattcggcagtctactactgtcagcattacgagtcctccccttcatggaccttcggtcaagggaccaaagtggagatcaagaccactaccccagcaccgaggccacccaccccggctcctaccatcgcctcccagcctctgtccctgcgtccggaggcatgtagacccgcagctggtggggccgtgcatacccggggtcttgacttcgcctgcgatatctacatttgggcccctctggctggtacttgcggggtcctgctgctttcactcgtgatcactctttactgtaagcgcggtcggaagaagctgctgtacatctttaagcaacccttcatgaggcctgtgcagactactcaagaggaggacggctgttcatgccggttcccagaggaggaggaaggcggctgcgaactgcgcgtgaaattcagccgcagcgcagatgctccagcctacaagcaggggcagaaccagctctacaacgaactcaatcttggtcggagagaggagtacgacgtgctggacaagcggagaggacgggacccagaaatgggcgggaagccgcgcagaaagaatccccaagagggcctgtacaacgagctccaaaaggataagatggcagaagcctatagcgagattggtatgaaaggggaacgcagaagaggcaaaggccacgacggactgtaccagggactcagcaccgccaccaaggacacctatgacgctcttcacatgcaggccctgccgcctcgg

SEQ ID NO: 248 - DNA, 1455 bp, Artificial Sequence
  source: /note="Description of Artificial Sequence: Synthetic polynucleotide"
atggccctccctgtcaccgccctgctgcttccgctggctcttctgctccacgccgctcggcccgaggtgcagttggtcgaaagcgggggcgggcttgtgcagcctggcggatcactgcggctgtcctgcgcggcatcaggcttcacgttttcttcctacgccatgtcctgggtgcgccaggcccctggaaagggactggaatgggtgtccgcgatttcggggtccggcgggagcacctactacgccgattccgtgaagggccgcttcactatctcgcgggacaactccaagaacaccctctacctccaaatgaatagcctgcgggccgaggataccgccgtctactattgcgctaaggtcgtgcgcgacggaatggacgtgtggggacagggtaccaccgtgacagtgtcctcggggggaggcggtagcggcggaggaggaagcggtggtggaggttccgagattgtgctgactcaatcacccgcgaccctgagcctgtcccccggcgaaagggccactctgtcctgtcgggccagccaatcagtctcctcctcgtacctggcctggtaccagcagaagccaggacaggctccgagactccttatctatggcgcatcctcccgcgccaccggaatcccggataggttctcgggaaacggatcggggaccgacttcactctcaccatctcccggctggaaccggaggacttcgccgtgtactactgccagcagtacggcagcccgcctagattcactttcggccccggcaccaaagtggacatcaagaccactaccccagcaccgaggccacccaccccggctcctaccatcgcctcccagcctctgtccctgcgtccggaggcatgtagacccgcagctggtggggccgtgcatacccggggtcttgacttcgcctgcgatatctacatttgggcccctctggctggtacttgcggggtcctgctgctttcactcgtgatcactctttactgtaagcgcggtcggaagaagctgctgtacatctttaagcaacccttcatgaggcctgtgcagactactcaagaggaggacggctgttcatgccggttcccagaggaggaggaaggcggctgcgaactgcgcgtgaaattcagccgcagcgcagatgctccagcctacaagcaggggcagaaccagctctacaacgaactcaatcttggtcggagagaggagtacgacgtgctggacaagcggagaggacgggacccagaaatgggcgggaagccgcgcagaaagaatccccaagagggcctgtacaacgagctccaaaaggataagatggcagaagcctatagcgagattggtatgaaaggggaacgcagaagaggcaaaggccacgacggactgtaccagggactcagcaccgccaccaaggacacctatgacgctcttcacatgcaggccctgccgcctcgg

SEQ ID NO: 249 - DNA, 1458 bp, Artificial Sequence
  source: /note="Description of Artificial Sequence: Synthetic polynucleotide"
atggccctccctgtcaccgccctgctgcttccgctggctcttctgctccacgccgctcggcccgaagtgcagctgctggagtccggcggtggattggtgcaaccggggggatcgctcagactgtcctgtgcggcgtcaggcttcaccttctcgagctacgccatgtcatgggtcagacaggcccctggaaagggtctggaatgggtgtccgccatttccgggagcgggggatctacatactacgccgatagcgtgaagggccgcttcaccatttcccgggacaactccaagaacactctctatctgcaaatgaactccctccgcgctgaggacactgccgtgtactactgcgccaaaatccctcagaccggcaccttcgactactggggacaggggactctggtcaccgtcagcagcggtggcggaggttcggggggaggaggaagcggcggcggagggtccgagattgtgctgacccagtcacccggcactttgtccctgtcgcctggagaaagggccaccctttcctgccgggcatcccaatccgtgtcctcctcgtacctggcctggtaccagcagaggcccggacaggccccacggcttctgatctacggagcaagcagccgcgcgaccggtatcccggaccggttttcgggctcgggctcaggaactgacttcaccctcaccatctcccgcctggaacccgaagatttcgctgtgtattactgccagcactacggcagctccccgtcctggacgttcggccagggaactcggctggagatcaagaccactaccccagcaccgaggccacccaccccggctcctaccatcgcctcccagcctctgtccctgcgtccggaggcatgtagacccgcagctggtggggccgtgcatacccggggtcttgacttcgcctgcgatatctacatttgggcccctctggctggtacttgcggggtcctgctgctttcactcgtgatcactctttactgtaagcgcggtcggaagaagctgctgtacatctttaagcaacccttcatgaggcctgtgcagactactcaagaggaggacggctgttcatgccggttcccagaggaggaggaaggcggctgcgaactgcgcgtgaaattcagccgcagcgcagatgctccagcctacaagcaggggcagaaccagctctacaacgaactcaatcttggtcggagagaggagtacgacgtgctggacaagcggagaggacgggacccagaaatgggcgggaagccgcgcagaaagaatccccaagagggcctgtacaacgagctccaaaaggataagatggcagaagcctatagcgagattggtatgaaaggggaacgcagaagaggcaaaggccacgacggactgtaccagggactcagcaccgccaccaaggacacctatgacgctcttcacatgcaggccctgccgcctcgg

SEQ ID NO: 250 - DNA, 1476 bp, Artificial Sequence
  source: /note="Description of Artificial Sequence: Synthetic polynucleotide"
atggccctccctgtcaccgccctgctgcttccgctggctcttctgctccacgccgctcggcccgaagtgcaactggtggaaaccggtggaggactcgtgcagcctggcggcagcctccggctgagctgcgccgcttcgggattcaccttttcctcctacgcgatgtcttgggtcagacaggcccccggaaaggggctggaatgggtgtcagccatctccggctccggcggatcaacgtactacgccgactccgtgaaaggccggttcaccatgtcgcgcgagaatgacaagaactccgtgttcctgcaaatgaactccctgagggtggaggacaccggagtgtactattgtgcgcgcgccaactacaagagagagctgcggtactactacggaatggacgtctggggacagggaactatggtgaccgtgtcatccggtggagggggaagcggcggtggaggcagcgggggcgggggttcagaaattgtcatgacccagtccccgggaactctttccctctcccccggggaatccgcgactttgtcctgccgggccagccagcgcgtggcctcgaactacctcgcatggtaccagcataagccaggccaagccccttccctgctgatttccggggctagcagccgcgccactggcgtgccggataggttctcgggaagcggctcgggtaccgatttcaccctggcaatctcgcggctggaaccggaggattcggccgtgtactactgccagcactatgactcatccccctcctggacattcggacagggcaccaaggtcgagatcaagaccactaccccagcaccgaggccacccaccccggctcctaccatcgcctcccagcctctgtccctgcgtccggaggcatgtagacccgcagctggtggggccgtgcatacccggggtcttgacttcgcctgcgatatctacatttgggcccctctggctggtacttgcggggtcctgctgctttcactcgtgatcactctttactgtaagcgcggtcggaagaagctgctgtacatctttaagcaacccttcatgaggcctgtgcagactactcaagaggaggacggctgttcatgccggttcccagaggaggaggaaggcggctgcgaactgcgcgtgaaattcagccgcagcgcagatgctccagcctacaagcaggggcagaaccagctctacaacgaactcaatcttggtcggagagaggagtacgacgtgctggacaagcggagaggacgggacccagaaatgggcgggaagccgcgcagaaagaatccccaagagggcctgtacaacgagctccaaaaggataagatggcagaagcctatagcgagattggtatgaaaggggaacgcagaagaggcaaaggccacgacggactgtaccagggactcagcaccgccaccaaggacacctatgacgctcttcacatgcaggccctgccgcctcgg

SEQ ID NO: 251 - DNA, 1464 bp, Artificial Sequence
  source: /note="Description of Artificial Sequence: Synthetic polynucleotide"
atggccctccctgtcaccgccctgctgcttccgctggctcttctgctccacgccgctcggcccgaagtgcagctgctcgaaaccggtggagggctggtgcagccagggggctccctgaggctttcatgcgccgctagcggattctccttctcctcttacgccatgtcgtgggtccgccaagcccctggaaaaggcctggaatgggtgtccgcgatttccgggagcggaggttcgacctattacgccgactccgtgaagggccgctttaccatctcccgggataactccaagaacactctgtacctccaaatgaactcgctgagagccgaggacaccgccgtgtattactgcgcgaaggcgctggtcggcgcgactggggcattcgacatctggggacagggaactcttgtgaccgtgtcgagcggaggcggcggctccggcggaggagggagcgggggcggtggttccgaaatcgtgttgactcagtccccgggaaccctgagcttgtcacccggggagcgggccactctctcctgtcgcgcctcccaatcgctctcatccaatttcctggcctggtaccagcagaagcccggacaggccccgggcctgctcatctacggcgcttcaaactgggcaacgggaacccctgatcggttcagcggaagcggatcgggtactgactttaccctgaccatcaccagactggaaccggaggacttcgccgtgtactactgccagtactacggcacctcccccatgtacacattcggacagggtaccaaggtcgagattaagaccactaccccagcaccgaggccacccaccccggctcctaccatcgcctcccagcctctgtccctgcgtccggaggcatgtagacccgcagctggtggggccgtgcatacccggggtcttgacttcgcctgcgatatctacatttgggcccctctggctggtacttgcggggtcctgctgctttcactcgtgatcactctttactgtaagcgcggtcggaagaagctgctgtacatctttaagcaacccttcatgaggcctgtgcagactactcaagaggaggacggctgttcatgccggttcccagaggaggaggaaggcggctgcgaactgcgcgtgaaattcagccgcagcgcagatgctccagcctacaagcaggggcagaaccagctctacaacgaactcaatcttggtcggagagaggagtacgacgtgctggacaagcggagaggacgggacccagaaatgggcgggaagccgcgcagaaagaatccccaagagggcctgtacaacgagctccaaaaggataagatggcagaagcctatagcgagattggtatgaaaggggaacgcagaagaggcaaaggccacgacggactgtaccagggactcagcaccgccaccaaggacacctatgacgctcttcacatgcaggccctgccgcctcgg

SEQ ID NO: 252 - DNA, 1464 bp, Artificial Sequence
  source: /note="Description of Artificial Sequence: Synthetic polynucleotide"
atggccctccctgtcaccgccctgctgcttccgctggctcttctgctccacgccgctcggcccgaagtgcagctgcttgagagcggtggaggtctggtgcagcccgggggatcactgcgcctgtcctgtgccgcgtccggtttcactttctcctcgtacgccatgtcgtgggtcagacaggcaccgggaaagggactggaatgggtgtcagccatttcgggttcggggggcagcacctactacgctgactccgtgaagggccggttcaccatttcccgcgacaactccaagaacaccttgtacctccaaatgaactccctgcgggccgaagataccgccgtgtattactgcgtgctgtggttcggagagggattcgacccgtggggacaaggaacactcgtgactgtgtcatccggcggaggcggcagcggtggcggcggttccggcggcggcggatctgacatcgtgttgacccagtcccctctgagcctgccggtcactcctggcgaaccagccagcatctcctgccggtcgagccagtccctcctgcactccaatgggtacaactacctcgattggtatctgcaaaagccgggccagagcccccagctgctgatctaccttgggtcaaaccgcgcttccggggtgcctgatagattctccgggtccgggagcggaaccgactttaccctgaaaatctcgagggtggaggccgaggacgtcggagtgtactactgcatgcaggcgctccagactcccctgaccttcggaggaggaacgaaggtcgacatcaagaccactaccccagcaccgaggccacccaccccggctcctaccatcgcctcccagcctctgtccctgcgtccggaggcatgtagacccgcagctggtggggccgtgcatacccggggtcttgacttcgcctgcgatatctacatttgggcccctctggctggtacttgcggggtcctgctgctttcactcgtgatcactctttactgtaagcgcggtcggaagaagctgctgtacatctttaagcaacccttcatgaggcctgtgcagactactcaagaggaggacggctgttcatgccggttcccagaggaggaggaaggcggctgcgaactgcgcgtgaaattcagccgcagcgcagatgctccagcctacaagcaggggcagaaccagctctacaacgaactcaatcttggtcggagagaggagtacgacgtgctggacaagcggagaggacgggacccagaaatgggcgggaagccgcgcagaaagaatccccaagagggcctgtacaacgagctccaaaaggataagatggcagaagcctatagcgagattggtatgaaaggggaacgcagaagaggcaaaggccacgacggactgtaccagggactcagcaccgccaccaaggacacctatgacgctcttcacatgcaggccctgccgcctcgg

SEQ ID NO: 253 - DNA, 1485 bp, Artificial Sequence
  source: /note="Description of Artificial Sequence: Synthetic polynucleotide"
atggccctccctgtcaccgccctgctgcttccgctggctcttctgctccacgccgctcggccccaagtgcagctcgtggagtcaggcggaggactggtgcagcccgggggctccctgagactttcctgcgcggcatcgggttttaccttctcctcctatgctatgtcctgggtgcgccaggccccgggaaagggactggaatgggtgtccgcaatcagcggtagcgggggctcaacatactacgccgactccgtcaagggtcgcttcactatttcccgggacaactccaagaataccctgtacctccaaatgaacagcctcagggccgaggatactgccgtgtactactgcgccaaagtcggatacgatagctccggttactaccgggactactacggaatggacgtgtggggacagggcaccaccgtgaccgtgtcaagcggcggaggcggttcaggagggggaggctccggcggtggagggtccgaaatcgtcctgactcagtcgcctggcactctgtcgttgtccccgggggagcgcgctaccctgtcgtgtcgggcgtcgcagtccgtgtcgagctcctacctcgcgtggtaccagcagaagcccggacaggcccctagacttctgatctacggcacttcttcacgcgccaccgggatcagcgacaggttcagcggctccggctccgggaccgacttcaccctgaccattagccggctggagcctgaagatttcgccgtgtattactgccaacactacggaaactcgccgccaaagttcacgttcggacccggaaccaagctggaaatcaagaccactaccccagcaccgaggccacccaccccggctcctaccatcgcctcccagcctctgtccctgcgtccggaggcatgtagacccgcagctggtggggccgtgcatacccggggtcttgacttcgcctgcgatatctacatttgggcccctctggctggtacttgcggggtcctgctgctttcactcgtgatcactctttactgtaagcgcggtcggaagaagctgctgtacatctttaagcaacccttcatgaggcctgtgcagactactcaagaggaggacggctgttcatgccggttcccagaggaggaggaaggcggctgcgaactgcgcgtgaaattcagccgcagcgcagatgctccagcctacaagcaggggcagaaccagctctacaacgaactcaatcttggtcggagagaggagtacgacgtgctggacaagcggagaggacgggacccagaaatgggcgggaagccgcgcagaaagaatccccaagagggcctgtacaacgagctccaaaaggataagatggcagaagcctatagcgagattggtatgaaaggggaacgcagaagaggcaaaggccacgacggactgtaccagggactcagcaccgccaccaaggacacctatgacgctcttcacatgcaggccctgccgcctcgg

SEQ ID NO: 254 - DNA, 1470 bp, Artificial Sequence
  source: /note="Description of Artificial Sequence: Synthetic polynucleotide"
atggccctccctgtcaccgccctgctgcttccgctggctcttctgctccacgccgctcggcccgaagtccaactggtggagtccgggggagggctcgtgcagcccggaggcagccttcggctgtcgtgcgccgcctccgggttcacgttctcatcctacgcgatgtcgtgggtcagacaggcaccaggaaagggactggaatgggtgtccgccattagcggctccggcggtagcacctactatgccgactcagtgaagggaaggttcactatctcccgcgacaacagcaagaacaccctgtacctccaaatgaactctctgcgggccgaggataccgcggtgtactattgcgccaagatgggttggtccagcggatacttgggagccttcgacatttggggacagggcactactgtgaccgtgtcctccgggggtggcggatcgggaggcggcggctcgggtggagggggttccgaaatcgtgttgacccagtcaccgggaaccctctcgctgtccccgggagaacgggctacactgtcatgtagagcgtcccagtccgtggcttcctcgttcctggcctggtaccagcagaagccgggacaggcaccccgcctgctcatctacggagccagcggccgggcgaccggcatccctgaccgcttctccggttccggctcgggcaccgactttactctgaccattagcaggcttgagcccgaggattttgccgtgtactactgccaacactacggggggagccctcgcctgaccttcggaggcggaactaaggtcgatatcaaaaccactaccccagcaccgaggccacccaccccggctcctaccatcgcctcccagcctctgtccctgcgtccggaggcatgtagacccgcagctggtggggccgtgcatacccggggtcttgacttcgcctgcgatatctacatttgggcccctctggctggtacttgcggggtcctgctgctttcactcgtgatcactctttactgtaagcgcggtcggaagaagctgctgtacatctttaagcaacccttcatgaggcctgtgcagactactcaagaggaggacggctgttcatgccggttcccagaggaggaggaaggcggctgcgaactgcgcgtgaaattcagccgcagcgcagatgctccagcctacaagcaggggcagaaccagctctacaacgaactcaatcttggtcggagagaggagtacgacgtgctggacaagcggagaggacgggacccagaaatgggcgggaagccgcgcagaaagaatccccaagagggcctgtacaacgagctccaaaaggataagatggcagaagcctatagcgagattggtatgaaaggggaacgcagaagaggcaaaggccacgacggactgtaccagggactcagcaccgccaccaaggacacctatgacgctcttcacatgcaggccctgccgcctcgg

SEQ ID NO: 255 - protein, 122 aa, Artificial Sequence
  source: /note="Description of Artificial Sequence: Synthetic polypeptide"
QIQLVQSGPDLKKPGETVKLSCKASGYTFTNFGMNWVKQAPGKGFKWMAWINTYTGESYFADDFKGRFAFSVETSATTAYLQINNLKTEDTATYFCARGEIYYGYDGGFAYWGQGTLVTVSA

SEQ ID NO: 256 - protein, 117 aa, Artificial Sequence
  source: /note="Description of Artificial Sequence: Synthetic polypeptide"
QIQLVQSGPELKKPGETVKISCKASGYTFTDYSINWVKRAPGKGLKWMGWINTETREPAYAYDFRGRFAFSLETSASTAYLQINNLKYEDTATYFCALDYSYAMDYWGQGTSVTVSS

SEQ ID NO: 257 - protein, 117 aa, Artificial Sequence
  source: /note="Description of Artificial Sequence: Synthetic polypeptide"
QIQLVQSGPELKKPGETVKISCKASGYTFRHYSMNWVKQAPGKGLKWMGRINTESGVPIYADDFKGRFAFSVETSASTAYLVINNLKDEDTASYFCSNDYLYSLDFWGQGTALTVSS

SEQ ID NO: 258 - protein, 117 aa, Artificial Sequence
  source: /note="Description of Artificial Sequence: Synthetic polypeptide"
QIQLVQSGPELKKPGETVKISCKASGYTFTHYSMNWVKQAPGKGLKWMGRINTETGEPLYADDFKGRFAFSLETSASTAYLVINNLKNEDTATFFCSNDYLYSCDYWGQGTTLTVSS

SEQ ID NO: 259 - protein, 107 aa, Artificial Sequence
  source: /note="Description of Artificial Sequence: Synthetic polypeptide"
DVVMTQSHRFMSTSVGDRVSITCRASQDVNTAVSWYQQKPGQSPKLLIFSASYRYTGVPDRFTGSGSGADFTLTISSVQAEDLAVYYCQQHYSTPWTFGGGTKLDIK

SEQ ID NO: 260 - protein, 111 aa, Artificial Sequence
  source: /note="Description of Artificial Sequence: Synthetic polypeptide"
DIVLTQSPASLAMSLGKRATISCRASESVSVIGAHLIHWYQQKPGQPPKLLIYLASNLETGVPARFSGSGSGTDFTLTIDPVEEDDVAIYSCLQSRIFPRTFGGGTKLEIK

SEQ ID NO: 261 - protein, 111 aa, Artificial Sequence
  source: /note="Description of Artificial Sequence: Synthetic polypeptide"
DIVLTQSPPSLAMSLGKRATISCRASESVTILGSHLIYWYQQKPGQPPTLLIQLASNVQTGVPARFSGSGSRTDFTLTIDPVEEDDVAVYYCLQSRTIPRTFGGGTKLEIK

SEQ ID NO: 262 - protein, 111 aa, Artificial Sequence; identical to SEQ ID NO: 261
  source: /note="Description of Artificial Sequence: Synthetic polypeptide"

SEQ ID NO: 263 - protein, 244 aa, Artificial Sequence
  source: /note="Description of Artificial Sequence: Synthetic polypeptide"
QIQLVQSGPDLKKPGETVKLSCKASGYTFTNFGMNWVKQAPGKGFKWMAWINTYTGESYFADDFKGRFAFSVETSATTAYLQINNLKTEDTATYFCARGEIYYGYDGGFAYWGQGTLVTVSAGGGGSGGGGSGGGGSDVVMTQSHRFMSTSVGDRVSITCRASQDVNTAVSWYQQKPGQSPKLLIFSASYRYTGVPDRFTGSGSGADFTLTISSVQAEDLAVYYCQQHYSTPWTFGGGTKLDIK

SEQ ID NO: 264 - protein, 249 aa, Artificial Sequence
  source: /note="Description of Artificial Sequence: Synthetic polypeptide"
QIQLVQSGPELKKPGETVKISCKASGYTFTDYSINWVKRAPGKGLKWMGWINTETREPAYAYDFRGRFAFSLETSASTAYLQINNLKYEDTATYFCALDYSYAMDYWGQGTSVTVSSGGGGSGGGGSGGGGSQIQLVQSGPELKKPGETVKISCKASGYTFTDYSINWVKRAPGKGLKWMGWINTETREPAYAYDFRGRFAFSLETSASTAYLQINNLKYEDTATYFCALDYSYAMDYWGQGTSVTVSS

SEQ ID NO: 265 - protein, 243 aa, Artificial Sequence
  source: /note="Description of Artificial Sequence: Synthetic polypeptide"
QIQLVQSGPELKKPGETVKISCKASGYTFRHYSMNWVKQAPGKGLKWMGRINTESGVPIYADDFKGRFAFSVETSASTAYLVINNLKDEDTASYFCSNDYLYSLDFWGQGTALTVSSGGGGSGGGGSGGGGSDIVLTQSPPSLAMSLGKRATISCRASESVTILGSHLIYWYQQKPGQPPTLLIQLASNVQTGVPARFSGSGSRTDFTLTIDPVEEDDVAVYYCLQSRTIPRTFGGGTKLEIK

SEQ ID NO: 266 - protein, 243 aa, Artificial Sequence
  source: /note="Description of Artificial Sequence: Synthetic polypeptide"
QIQLVQSGPELKKPGETVKISCKASGYTFTHYSMNWVKQAPGKGLKWMGRINTETGEPLYADDFKGRFAFSLETSASTAYLVINNLKNEDTATFFCSNDYLYSCDYWGQGTTLTVSSGGGGSGGGGSGGGGSDIVLTQSPPSLAMSLGKRATISCRASESVTILGSHLIYWYQQKPGQPPTLLIQLASNVQTGVPARFSGSGSRTDFTLTIDPVEEDDVAVYYCLQSRTIPRTFGGGTKLEIK

SEQ ID NO: 267 - protein, 467 aa, Artificial Sequence
  source: /note="Description of Artificial Sequence: Synthetic polypeptide"
QIQLVQSGPDLKKPGETVKLSCKASGYTFTNFGMNWVKQAPGKGFKWMAWINTYTGESYFADDFKGRFAFSVETSATTAYLQINNLKTEDTATYFCARGEIYYGYDGGFAYWGQGTLVTVSAGGGGSGGGGSGGGGSDVVMTQSHRFMSTSVGDRVSITCRASQDVNTAVSWYQQKPGQSPKLLIFSASYRYTGVPDRFTGSGSGADFTLTISSVQAEDLAVYYCQQHYSTPWTFGGGTKLDIKTTTPAPRPPTPAPTIASQPLSLRPEACRPAAGGAVHTRGLDFACDIYIWAPLAGTCGVLLLSLVITLYCKRGRKKLLYIFKQPFMRPVQTTQEEDGCSCRFPEEEEGGCELRVKFSRSADAPAYKQGQNQLYNELNLGRREEYDVLDKRRGRDPEMGGKPRRKNPQEGLYNELQKDKMAEAYSEIGMKGERRRGKGHDGLYQGLSTATKDTYDALHMQALPPR

SEQ ID NO: 268 - protein, 472 aa, Artificial Sequence
  source: /note="Description of Artificial Sequence: Synthetic polypeptide"
QIQLVQSGPELKKPGETVKISCKASGYTFTDYSINWVKRAPGKGLKWMGWINTETREPAYAYDFRGRFAFSLETSASTAYLQINNLKYEDTATYFCALDYSYAMDYWGQGTSVTVSSGGGGSGGGGSGGGGSQIQLVQSGPELKKPGETVKISCKASGYTFTDYSINWVKRAPGKGLKWMGWINTETREPAYAYDFRGRFAFSLETSASTAYLQINNLKYEDTATYFCALDYSYAMDYWGQGTSVTVSSTTTPAPRPPTPAPTIASQPLSLRPEACRPAAGGAVHTRGLDFACDIYIWAPLAGTCGVLLLSLVITLYCKRGRKKLLYIFKQPFMRPVQTTQEEDGCSCRFPEEEEGGCELRVKFSRSADAPAYKQGQNQLYNELNLGRREEYDVLDKRRGRDPEMGGKPRRKNPQEGLYNELQKDKMAEAYSEIGMKGERRRGKGHDGLYQGLSTATKDTYDALHMQALPPR

SEQ ID NO: 269 - protein, 466 aa, Artificial Sequence
  source: /note="Description of Artificial Sequence: Synthetic polypeptide"
QIQLVQSGPELKKPGETVKISCKASGYTFRHYSMNWVKQAPGKGLKWMGRINTESGVPIYADDFKGRFAFSVETSASTAYLVINNLKDEDTASYFCSNDYLYSLDFWGQGTALTVSSGGGGSGGGGSGGGGSDIVLTQSPPSLAMSLGKRATISCRASESVTILGSHLIYWYQQKPGQPPTLLIQLASNVQTGVPARFSGSGSRTDFTLTIDPVEEDDVAVYYCLQSRTIPRTFGGGTKLEIKTTTPAPRPPTPAPTIASQPLSLRPEACRPAAGGAVHTRGLDFACDIYIWAPLAGTCGVLLLSLVITLYCKRGRKKLLYIFKQPFMRPVQTTQEEDGCSCRFPEEEEGGCELRVKFSRSADAPAYKQGQNQLYNELNLGRREEYDVLDKRRGRDPEMGGKPRRKNPQEGLYNELQKDKMAEAYSEIGMKGERRRGKGHDGLYQGLSTATKDTYDALHMQALPPR

SEQ ID NO: 270 - protein, 466 aa, Artificial Sequence
  source: /note="Description of Artificial Sequence: Synthetic polypeptide"
QIQLVQSGPELKKPGETVKISCKASGYTFTHYSMNWVKQAPGKGLKWMGRINTETGEPLYADDFKGRFAFSLETSASTAYLVINNLKNEDTATFFCSNDYLYSCDYWGQGTTLTVSSGGGGSGGGGSGGGGSDIVLTQSPPSLAMSLGKRATISCRASESVTILGSHLIYWYQQKPGQPPTLLIQLASNVQTGVPARFSGSGSRTDFTLTIDPVEEDDVAVYYCLQSRTIPRTFGGGTKLEIKTTTPAPRPPTPAPTIASQPLSLRPEACRPAAGGAVHTRGLDFACDIYIWAPLAGTCGVLLLSLVITLYCKRGRKKLLYIFKQPFMRPVQTTQEEDGCSCRFPEEEEGGCELRVKFSRSADAPAYKQGQNQLYNELNLGRREEYDVLDKRRGRDPEMGGKPRRKNPQEGLYNELQKDKMAEAYSEIGMKGERRRGKGHDGLYQGLSTATKDTYDALHMQALPPR

SEQ ID NO: 271-391 - skipped (121 entries)

SEQ ID NO: 392 - protein, 462 aa, Artificial Sequence
  source: /note="Description of Artificial Sequence: Synthetic polypeptide"
EVQLVESGGGLVQPGGSLRLSCAVSGFALSNHGMSWVRRAPGKGLEWVSGIVYSGSTYYAASVKGRFTISRDNSRNTLYLQMNSLRPEDTAIYYCSAHGGESDVWGQGTTVTVSSASGGGGSGGRASGGGGSDIQLTQSPSSLSASVGDRVTITCRASQSISSYLNWYQQKPGKAPKLLIYAASSLQSGVPSRFSGSGSGTDFTLTISSLQPEDFATYYCQQSYSTPYTFGQGTKVEIKTTTPAPRPPTPAPTIASQPLSLRPEACRPAAGGAVHTRGLDFACDIYIWAPLAGTCGVLLLSLVITLYCKRGRKKLLYIFKQPFMRPVQTTQEEDGCSCRFPEEEEGGCELRVKFSRSADAPAYKQGQNQLYNELNLGRREEYDVLDKRRGRDPEMGGKPRRKNPQEGLYNELQKDKMAEAYSEIGMKGERRRGKGHDGLYQGLSTATKDTYDALHMQALPPR

SEQ ID NO: 393 - protein, 445 aa, Artificial Sequence
  source: /note="Description of Artificial Sequence: Synthetic polypeptide"
EVQLVESGGGLVQPGGSLRLSCAVSGFALSNHGMSWVRRAPGKGLEWVSGIVYSGSTYYAASVKGRFTISRDNSRNTLYLQMNSLRPEDTAIYYCSAHGGESDVWGQGTTVTVSSDIQLTQSPSSLSASVGDRVTITCRASQSISSYLNWYQQKPGKAPKLLIYAASSLQSGVPSRFSGSGSGTDFTLTISSLQPEDFATYYCQQSYSTPYTFGQGTKVEIKTTTPAPRPPTPAPTIASQPLSLRPEACRPAAGGAVHTRGLDFACDIYIWAPLAGTCGVLLLSLVITLYCKRGRKKLLYIFKQPFMRPVQTTQEEDGCSCRFPEEEEGGCELRVKFSRSADAPAYKQGQNQLYNELNLGRREEYDVLDKRRGRDPEMGGKPRRKNPQEGLYNELQKDKMAEAYSEIGMKGERRRGKGHDGLYQGLSTATKDTYDALHMQALPPR

SEQ ID NO: 394-500 - skipped (107 entries)

SEQ ID NO: 501 - protein, 5 aa, Artificial Sequence
  source: /note="Description of Artificial Sequence: Synthetic peptide"
TYWMH

SEQ ID NO: 502 - protein, 17 aa, Artificial Sequence
  source: /note="Description of Artificial Sequence: Synthetic peptide"
NIYPGTGGSNFDEKFKN

SEQ ID NO: 503 - protein, 8 aa, Artificial Sequence
  source: /note="Description of Artificial Sequence: Synthetic peptide"
WTTGTGAY

SEQ ID NO: 504 - protein, 7 aa, Artificial Sequence
  source: /note="Description of Artificial Sequence: Synthetic peptide"
GYTFTTY

SEQ ID NO: 505 - protein, 6 aa, Artificial Sequence
  source: /note="Description of Artificial Sequence: Synthetic peptide"
YPGTGG

SEQ ID NO: 506 - protein, 117 aa, Artificial Sequence
  source: /note="Description of Artificial Sequence: Synthetic polypeptide"
EVQLVQSGAEVKKPGESLRISCKGSGYTFTTYWMHWVRQATGQGLEWMGNIYPGTGGSNFDEKFKNRVTITADKSTSTAYMELSSLRSEDTAVYYCTRWTTGTGAYWGQGTTVTVSS

SEQ ID NO: 507 - DNA, 351 bp, Artificial Sequence
  source: /note="Description of Artificial Sequence: Synthetic polynucleotide"
gaggtgcagctggtgcagtcaggcgccgaagtgaagaagcccggcgagtcactgagaattagctgtaaaggttcaggctacaccttcactacctactggatgcactgggtccgccaggctaccggtcaaggcctcgagtggatgggtaatatctaccccggcaccggcggctctaacttcgacgagaagtttaagaatagagtgactatcaccgccgataagtctactagcaccgcctatatggaactgtctagcctgagatcagaggacaccgccgtctactactgcactaggtggactaccggcacaggcgcctactggggtcaaggcactaccgtgaccgtgtctagc

SEQ ID NO: 508 - protein, 443 aa, Artificial Sequence
  source: /note="Description of Artificial Sequence: Synthetic polypeptide"
EVQLVQSGAEVKKPGESLRISCKGSGYTFTTYWMHWVRQATGQGLEWMGNIYPGTGGSNFDEKFKNRVTITADKSTSTAYMELSSLRSEDTAVYYCTRWTTGTGAYWGQGTTVTVSSASTKGPSVFPLAPCSRSTSESTAALGCLVKDYFPEPVTVSWNSGALTSGVHTFPAVLQSSGLYSLSSVVTVPSSSLGTKTYTCNVDHKPSNTKVDKRVESKYGPPCPPCPAPEFLGGPSVFLFPPKPKDTLMISRTPEVTCVVVDVSQEDPEVQFNWYVDGVEVHNAKTKPREEQFNSTYRVVSVLTVLHQDWLNGKEYKCKVSNKGLPSSIEKTISKAKGQPREPQVYTLPPSQEEMTKNQVSLTCLVKGFYPSDIAVEWESNGQPENNYKTTPPVLDSDGSFFLYSRLTVDKSRWQEGNVFSCSVMHEALHNHYTQKSLSLSLG

SEQ ID NO: 509 - DNA, 1329 bp, Artificial Sequence
  source: /note="Description of Artificial Sequence: Synthetic polynucleotide"
gaggtgcagctggtgcagtcaggcgccgaagtgaagaagcccggcgagtcactgagaattagctgtaaaggttcaggctacaccttcactacctactggatgcactgggtccgccaggctaccggtcaaggcctcgagtggatgggtaatatctaccccggcaccggcggctctaacttcgacgagaagtttaagaatagagtgactatcaccgccgataagtctactagcaccgcctatatggaactgtctagcctgagatcagaggacaccgccgtctactactgcactaggtggactaccggcacaggcgcctactggggtcaaggcactaccgtgaccgtgtctagcgctagcactaagggcccgtccgtgttccccctggcaccttgtagccggagcactagcgaatccaccgctgccctcggctgcctggtcaaggattacttcccggagcccgtgaccgtgtcctggaacagcggagccctgacctccggagtgcacaccttccccgctgtgctgcagagctccgggctgtactcgctgtcgtcggtggtcacggtgccttcatctagcctgggtaccaagacctacacttgcaacgtggaccacaagccttccaacactaaggtggacaagcgcgtcgaatcgaagtacggcccaccgtgcccgccttgtcccgcgccggagttcctcggcggtccctcggtctttctgttcccaccgaagcccaaggacactttgatgatttcccgcacccctgaagtgacatgcgtggtcgtggacgtgtcacaggaagatccggaggtgcagttcaattggtacgtggatggcgtcgaggtgcacaacgccaaaaccaagccgagggaggagcagttcaactccacttaccgcgtcgtgtccgtgctgacggtgctgcatcaggactggctgaacgggaaggagtacaagtgcaaagtgtccaacaagggacttcctagctcaatcgaaaagaccatctcgaaagccaagggacagccccgggaaccccaagtgtataccctgccaccgagccaggaagaaatgactaagaaccaagtctcattgacttgccttgtgaagggcttctacccatcggatatcgccgtggaatgggagtccaacggccagccggaaaacaactacaagaccacccctccggtgctggactcagacggatccttcttcctctactcgcggctgaccgtggataagagcagatggcaggagggaaatgtgttcagctgttctgtgatgcatgaagccctgcacaaccactacactcagaagtccctgtccctctccctggga

SEQ ID NO: 510 - protein, 17 aa, Artificial Sequence
  source: /note="Description of Artificial Sequence: Synthetic peptide"
KSSQSLLDSGNQKNFLT

SEQ ID NO: 511 - protein, 7 aa, Artificial Sequence
  source: /note="Description of Artificial Sequence: Synthetic peptide"
WASTRES

SEQ ID NO: 512 - protein, 9 aa, Artificial Sequence
  source: /note="Description of Artificial Sequence: Synthetic peptide"
QNDYSYPYT

SEQ ID NO: 513 - protein, 13 aa, Artificial Sequence
  source: /note="Description of Artificial Sequence: Synthetic peptide"
SQSLLDSGNQKNF

SEQ ID NO: 514 - protein, 3 aa, Artificial Sequence
  source: /note="Description of Artificial Sequence: Synthetic peptide"
WAS

SEQ ID NO: 515 - protein, 6 aa, Artificial Sequence
  source: /note="Description of Artificial Sequence: Synthetic peptide"
DYSYPY

SEQ ID NO: 516 - protein, 113 aa, Artificial Sequence
  source: /note="Description of Artificial Sequence: Synthetic polypeptide"
EIVLTQSPATLSLSPGERATLSCKSSQSLLDSGNQKNFLTWYQQKPGKAPKLLIYWASTRESGVPSRFSGSGSGTDFTFTISSLQPEDIATYYCQNDYSYPYTFGQGTKVEIK

SEQ ID NO: 517 - DNA, 339 bp, Artificial Sequence
  source: /note="Description of Artificial Sequence: Synthetic polynucleotide"
gagatcgtcctgactcagtcacccgctaccctgagcctgagccctggcgagcgggctacactgagctgtaaatctagtcagtcactgctggatagcggtaatcagaagaacttcctgacctggtatcagcagaagcccggtaaagcccctaagctgctgatctactgggcctctactagagaatcaggcgtgccctctaggtttagcggtagcggtagtggcaccgacttcaccttcactatctctagcctgcagcccgaggatatcgctacctactactgtcagaacgactatagctacccctacaccttcggtcaaggcactaaggtcgagattaag

SEQ ID NO: 518 - protein, 220 aa, Artificial Sequence
  source: /note="Description of Artificial Sequence: Synthetic polypeptide"
EIVLTQSPATLSLSPGERATLSCKSSQSLLDSGNQKNFLTWYQQKPGKAPKLLIYWASTRESGVPSRFSGSGSGTDFTFTISSLQPEDIATYYCQNDYSYPYTFGQGTKVEIKRTVAAPSVFIFPPSDEQLKSGTASVVCLLNNFYPREAKVQWKVDNALQSGNSQESVTEQDSKDSTYSLSSTLTLSKADYEKHKVYACEVTHQGLSSPVTKSFNRGEC

SEQ ID NO: 519 - DNA, 660 bp, Artificial Sequence
  source: /note="Description of Artificial Sequence: Synthetic polynucleotide"
gagatcgtcctgactcagtcacccgctaccctgagcctgagccctggcgagcgggctacactgagctgtaaatctagtcagtcactgctggatagcggtaatcagaagaacttcctgacctggtatcagcagaagcccggtaaagcccctaagctgctgatctactgggcctctactagagaatcaggcgtgccctctaggtttagcggtagcggtagtggcaccgacttcaccttcactatctctagcctgcagcccgaggatatcgctacctactactgtcagaacgactatagctacccctacaccttcggtcaaggcactaaggtcgagattaagcgtacggtggccgctcccagcgtgttcatcttcccccccagcgacgagcagctgaagagcggcaccgccagcgtggtgtgcctgctgaacaacttctacccccgggaggccaaggtgcagtggaaggtggacaacgccctgcagagcggcaacagccaggagagcgtcaccgagcaggacagcaaggactccacctacagcctgagcagcaccctgaccctgagcaaggccgactacgagaagcataaggtgtacgcctgcgaggtgacccaccagggcctgtccagccccgtgaccaagagcttcaacaggggcgagtgc

SEQ ID NO: 520 - protein, 113 aa, Artificial Sequence
  source: /note="Description of Artificial Sequence: Synthetic polypeptide"
EIVLTQSPATLSLSPGERATLSCKSSQSLLDSGNQKNFLTWYQQKPGQAPRLLIYWASTRESGVPSRFSGSGSGTDFTFTISSLEAEDAATYYCQNDYSYPYTFGQGTKVEIK

SEQ ID NO: 521 - DNA, 339 bp, Artificial Sequence
  source: /note="Description of Artificial Sequence: Synthetic polynucleotide"
gagatcgtcctgactcagtcacccgctaccctgagcctgagccctggcgagcgggctacactgagctgtaaatctagtcagtcactgctggatagcggtaatcagaagaacttcctgacctggtatcagcagaagcccggtcaagcccctagactgctgatctactgggcctctactagagaatcaggcgtgccctctaggtttagcggtagcggtagtggcaccgacttcaccttcactatctctagcctggaagccgaggacgccgctacctactactgtcagaacgactatagctacccctacaccttcggtcaaggcactaaggtcgagattaag

SEQ ID NO: 522 - protein, 220 aa, Artificial Sequence
  source: /note="Description of Artificial Sequence: Synthetic polypeptide"
EIVLTQSPATLSLSPGERATLSCKSSQSLLDSGNQKNFLTWYQQKPGQAPRLLIYWASTRESGVPSRFSGSGSGTDFTFTISSLEAEDAATYYCQNDYSYPYTFGQGTKVEIKRTVAAPSVFIFPPSDEQLKSGTASVVCLLNNFYPREAKVQWKVDNALQSGNSQESVTEQDSKDSTYSLSSTLTLSKADYEKHKVYACEVTHQGLSSPVTKSFNRGEC

SEQ ID NO: 523 - DNA, 660 bp, Artificial Sequence
  source: /note="Description of Artificial Sequence: Synthetic polynucleotide"
gagatcgtcctgactcagtcacccgctaccctgagcctgagccctggcgagcgggctacactgagctgtaaatctagtcagtcactgctggatagcggtaatcagaagaacttcctgacctggtatcagcagaagcccggtcaagcccctagactgctgatctactgggcctctactagagaatcaggcgtgccctctaggtttagcggtagcggtagtggcaccgacttcaccttcactatctctagcctggaagccgaggacgccgctacctactactgtcagaacgactatagctacccctacaccttcggtcaaggcactaaggtcgagattaagcgtacggtggccgctcccagcgtgttcatcttcccccccagcgacgagcagctgaagagcggcaccgccagcgtggtgtgcctgctgaacaacttctacccccgggaggccaaggtgcagtggaaggtggacaacgccctgcagagcggcaacagccaggagagcgtcaccgagcaggacagcaaggactccacctacagcctgagcagcaccctgaccctgagcaaggccgactacgagaagcataaggtgtacgcctgcgaggtgacccaccagggcctgtccagccccgtgaccaagagcttcaacaggggcgagtgc

SEQ ID NO: 524 - DNA, 15 bp, Artificial Sequence
  source: /note="Description of Artificial Sequence: Synthetic oligonucleotide"
acctactggatgcac

SEQ ID NO: 525 - DNA, 51 bp, Artificial Sequence
  source: /note="Description of Artificial Sequence: Synthetic oligonucleotide"
aatatctaccccggcaccggcggctctaacttcgacgagaagtttaagaat

SEQ ID NO: 526 - DNA, 24 bp, Artificial Sequence
  source: /note="Description of Artificial Sequence: Synthetic oligonucleotide"
tggactaccggcacaggcgcctac

SEQ ID NO: 527 - DNA, 21 bp, Artificial Sequence
  source: /note="Description of Artificial Sequence: Synthetic oligonucleotide"
ggctacaccttcactacctac

SEQ ID NO: 528 - DNA, 18 bp, Artificial Sequence
  source: /note="Description of Artificial Sequence: Synthetic oligonucleotide"
taccccggcaccggcggc

SEQ ID NO: 529 - DNA, 51 bp, Artificial Sequence
  source: /note="Description of Artificial Sequence: Synthetic oligonucleotide"
aaatctagtcagtcactgctggatagcggtaatcagaagaacttcctgacc

SEQ ID NO: 530 - DNA, 21 bp, Artificial Sequence
  source: /note="Description of Artificial Sequence: Synthetic oligonucleotide"
tgggcctctactagagaatca

SEQ ID NO: 531 - DNA, 27 bp, Artificial Sequence
  source: /note="Description of Artificial Sequence: Synthetic oligonucleotide"
cagaacgactatagctacccctacacc

SEQ ID NO: 532 - DNA, 39 bp, Artificial Sequence
  source: /note="Description of Artificial Sequence: Synthetic oligonucleotide"
agtcagtcactgctggatagcggtaatcagaagaacttc

SEQ ID NO: 533 - DNA, 9 bp, Artificial Sequence
  source: /note="Description of Artificial Sequence: Synthetic oligonucleotide"
tgggcctct

SEQ ID NO: 534 - DNA, 18 bp, Artificial Sequence
  source: /note="Description of Artificial Sequence: Synthetic oligonucleotide"
gactatagctacccctac

SEQ ID NO: 535 - protein, 440 aa, Artificial Sequence
  source: /note="Description of Artificial Sequence: Synthetic polypeptide"
QVQLVESGGGVVQPGRSLRLDCKASGITFSNSGMHWVRQAPGKGLEWVAVIWYDGSKRYYADSVKGRFTISRDNSKNTLFLQMNSLRAEDTAVYYCATNDDYWGQGTLVTVSSASTKGPSVFPLAPCSRSTSESTAALGCLVKDYFPEPVTVSWNSGALTSGVHTFPAVLQSSGLYSLSSVVTVPSSSLGTKTYTCNVDHKPSNTKVDKRVESKYGPPCPPCPAPEFLGGPSVFLFPPKPKDTLMISRTPEVTCVVVDVSQEDPEVQFNWYVDGVEVHNAKTKPREEQFNSTYRVVSVLTVLHQDWLNGKEYKCKVSNKGLPSSIEKTISKAKGQPREPQVYTLPPSQEEMTKNQVSLTCLVKGFYPSDIAVEWESNGQPENNYKTTPPVLDSDGSFFLYSRLTVDKSRWQEGNVFSCSVMHEALHNHYTQKSLSLSLGK

SEQ ID NO: 536 - protein, 214 aa, Artificial Sequence
  source: /note="Description of Artificial Sequence: Synthetic polypeptide"
EIVLTQSPATLSLSPGERATLSCRASQSVSSYLAWYQQKPGQAPRLLIYDASNRATGIPARFSGSGSGTDFTLTISSLEPEDFAVYYCQQSSNWPRTFGQGTKVEIKRTVAAPSVFIFPPSDEQLKSGTASVVCLLNNFYPREAKVQWKVDNALQSGNSQESVTEQDSKDSTYSLSSTLTLSKADYEKHKVYACEVTHQGLSSPVTKSFNRGEC

SEQ ID NO: 537 - protein, 447 aa, Artificial Sequence
  source: /note="Description of Artificial Sequence: Synthetic polypeptide"
QVQLVQSGVEVKKPGASVKVSCKASGYTFTNYYMYWVRQAPGQGLEWMGGINPSNGGTNFNEKFKNRVTLTTDSSTTTAYMELKSLQFDDTAVYYCARRDYRFDMGFDYWGQGTTVTVSSASTKGPSVFPLAPCSRSTSESTAALGCLVKDYFPEPVTVSWNSGALTSGVHTFPAVLQSSGLYSLSSVVTVPSSSLGTKTYTCNVDHKPSNTKVDKRVESKYGPPCPPCPAPEFLGGPSVFLFPPKPKDTLMISRTPEVTCVVVDVSQEDPEVQFNWYVDGVEVHNAKTKPREEQFNSTYRVVSVLTVLHQDWLNGKEYKCKVSNKGLPSSIEKTISKAKGQPREPQVYTLPPSQEEMTKNQVSLTCLVKGFYPSDIAVEWESNGQPENNYKTTPPVLDSDGSFFLYSRLTVDKSRWQEGNVFSCSVMHEALHNHYTQKSLSLSLGK

SEQ ID NO: 538 - protein, 218 aa, Artificial Sequence
  source: /note="Description of Artificial Sequence: Synthetic polypeptide"
EIVLTQSPATLSLSPGERATLSCRASKGVSTSGYSYLHWYQQKPGQAPRLLIYLASYLESGVPARFSGSGSGTDFTLTISSLEPEDFAVYYCQHSRDLPLTFGGGTKVEIKRTVAAPSVFIFPPSDEQLKSGTASVVCLLNNFYPREAKVQWKVDNALQSGNSQESVTEQDSKDSTYSLSSTLTLSKADYEKHKVYACEVTHQGLSSPVTKSFNRGEC

SEQ ID NO: 539 - protein, 447 aa, Artificial Sequence
  source: /note="Description of Artificial Sequence: Synthetic polypeptide"
QVQLVQSGSELKKPGASVKISCKASGYTFTNYGMNWVRQAPGQGLQWMGWINTDSGESTYAEEFKGRFVFSLDTSVNTAYLQITSLTAEDTGMYFCVRVGYDALDYWGQGTLVTVSSASTKGPSVFPLAPSSKSTSGGTAALGCLVKDYFPEPVTVSWNSGALTSGVHTFPAVLQSSGLYSLSSVVTVPSSSLGTQTYICNVNHKPSNTKVDKRVEPKSCDKTHTCPPCPAPELLGGPSVFLFPPKPKDTLMISRTPEVTCVVVDVSHEDPEVKFNWYVDGVEVHNAKTKPREEQYNSTYRVVSVLTVLHQDWLNGKEYKCKVSNKALPAPIEKTISKAKGQPREPQVYTLPPSREEMTKNQVSLTCLVKGFYPSDIAVEWESNGQPENNYKTTPPVLDSDGSFFLYSKLTVDKSRWQQGNVFSCSVMHEALHNHYTQKSLSLSPGK

SEQ ID NO: 540 - protein, 213 aa, Artificial Sequence
  source: /note="Description of Artificial Sequence: Synthetic polypeptide"
EIVLTQSPSSLSASVGDRVTITCSARSSVSYMHWFQQKPGKAPKLWIYRTSNLASGVPSRFSGSGSGTSYCLTINSLQPEDFATYYCQQRSSFPLTFGGGTKLEIKRTVAAPSVFIFPPSDEQLKSGTASVVCLLNNFYPREAKVQWKVDNALQSGNSQESVTEQDSKDSTYSLSSTLTLSKADYEKHKVYACEVTHQGLSSPVTKSFNRGEC

SEQ ID NO: 541 - protein, 10 aa, Artificial Sequence
  source: /note="Description of Artificial Sequence: Synthetic peptide"
GYTFTTYWMH

SEQ ID NO: 542-600 - skipped (59 entries)

SEQ ID NO: 601 - protein, 5 aa, Artificial Sequence
  source: /note="Description of Artificial Sequence: Synthetic peptide"
SYWMY

SEQ ID NO: 602 - protein, 17 aa, Artificial Sequence
  source: /note="Description of Artificial Sequence: Synthetic peptide"
RIDPNSGSTKYNEKFKN

SEQ ID NO: 603 - protein, 11 aa, Artificial Sequence
  source: /note="Description of Artificial Sequence: Synthetic peptide"
DYRKGLYAMDY

SEQ ID NO: 604 - protein, 7 aa, Artificial Sequence
  source: /note="Description of Artificial Sequence: Synthetic peptide"
GYTFTSY

SEQ ID NO: 605 - protein, 6 aa, Artificial Sequence
  source: /note="Description of Artificial Sequence: Synthetic peptide"
DPNSGS

SEQ ID NO: 606 - protein, 120 aa, Artificial Sequence
  source: /note="Description of Artificial Sequence: Synthetic polypeptide"
EVQLVQSGAEVKKPGATVKISCKVSGYTFTSYWMYWVRQARGQRLEWIGRIDPNSGSTKYNEKFKNRFTISRDNSKNTLYLQMNSLRAEDTAVYYCARDYRKGLYAMDYWGQGTTVTVSS

SEQ ID NO: 607 - DNA, 360 bp, Artificial Sequence
  source: /note="Description of Artificial Sequence: Synthetic polynucleotide"
gaagtgcagctggtgcagtcaggcgccgaagtgaagaaacccggcgctaccgtgaagattagctgtaaagtctcaggctacaccttcactagctactggatgtactgggtccgacaggctagagggcaaagactggagtggatcggtagaatcgaccctaatagcggctctactaagtataacgagaagtttaagaataggttcactattagtagggataactctaagaacaccctgtacctgcagatgaatagcctgagagccgaggacaccgccgtctactactgcgctagagactatagaaagggcctgtacgctatggactactggggtcaaggcactaccgtgaccgtgtcttca

SEQ ID NO: 608 - protein, 446 aa, Artificial Sequence
  source: /note="Description of Artificial Sequence: Synthetic polypeptide"
EVQLVQSGAEVKKPGATVKISCKVSGYTFTSYWMYWVRQARGQRLEWIGRIDPNSGSTKYNEKFKNRFTISRDNSKNTLYLQMNSLRAEDTAVYYCARDYRKGLYAMDYWGQGTTVTVSSASTKGPSVFPLAPCSRSTSESTAALGCLVKDYFPEPVTVSWNSGALTSGVHTFPAVLQSSGLYSLSSVVTVPSSSLGTKTYTCNVDHKPSNTKVDKRVESKYGPPCPPCPAPEFLGGPSVFLFPPKPKDTLMISRTPEVTCVVVDVSQEDPEVQFNWYVDGVEVHNAKTKPREEQFNSTYRVVSVLTVLHQDWLNGKEYKCKVSNKGLPSSIEKTISKAKGQPREPQVYTLPPSQEEMTKNQVSLTCLVKGFYPSDIAVEWESNGQPENNYKTTPPVLDSDGSFFLYSRLTVDKSRWQEGNVFSCSVMHEALHNHYTQKSLSLSLG

SEQ ID NO: 609 - protein, 11 aa, Artificial Sequence
  source: /note="Description of Artificial Sequence: Synthetic peptide"
KASQDVGTAVA

SEQ ID NO: 610 - protein, 7 aa, Artificial Sequence
  source: /note="Description of Artificial Sequence: Synthetic peptide"
WASTRHT

SEQ ID NO: 611 - protein, 9 aa, Artificial Sequence
  source: /note="Description of Artificial Sequence: Synthetic peptide"
QQYNSYPLT

SEQ ID NO: 612 - protein, 7 aa, Artificial Sequence
  source: /note="Description of Artificial Sequence: Synthetic peptide"
SQDVGTA

SEQ ID NO: 613 - protein, 3 aa, Artificial Sequence
  source: /note="Description of Artificial Sequence: Synthetic peptide"
WAS

SEQ ID NO: 614 - protein, 6 aa, Artificial Sequence
  source: /note="Description of Artificial Sequence: Synthetic peptide"
YNSYPL

SEQ ID NO: 615 - DNA, 1338 bp, Artificial Sequence
  source: /note="Description of Artificial Sequence: Synthetic polynucleotide"
gaagtgcagctggtgcagtcaggcgccgaagtgaagaaacccggcgctaccgtgaagattagctgtaaagtctcaggctacaccttcactagctactggatgtactgggtccgacaggctagagggcaaagactggagtggatcggtagaatcgaccctaatagcggctctactaagtataacgagaagtttaagaataggttcactattagtagggataactctaagaacaccctgtacctgcagatgaatagcctgagagccgaggacaccgccgtctactactgcgctagagactatagaaagggcctgtacgctatggactactggggtcaaggcactaccgtgaccgtgtcttcagctagcactaagggcccgtccgtgttccccctggcaccttgtagccggagcactagcgaatccaccgctgccctcggctgcctggtcaaggattacttcccggagcccgtgaccgtgtcctggaacagcggagccctgacctccggagtgcacaccttccccgctgtgctgcagagctccgggctgtactcgctgtcgtcggtggtcacggtgccttcatctagcctgggtaccaagacctacacttgcaacgtggaccacaagccttccaacactaaggtggacaagcgcgtcgaatcgaagtacggcccaccgtgcccgccttgtcccgcgccggagttcctcggcggtccctcggtctttctgttcccaccgaagcccaaggacactttgatgatttcccgcacccctgaagtgacatgcgtggtcgtggacgtgtcacaggaagatccggaggtgcagttcaattggtacgtggatggcgtcgaggtgcacaacgccaaaaccaagccgagggaggagcagttcaactccacttaccgcgtcgtgtccgtgctgacggtgctgcatcaggactggctgaacgggaaggagtacaagtgcaaagtgtccaacaagggacttcctagctcaatcgaaaagaccatctcgaaagccaagggacagccccgggaaccccaagtgtataccctgccaccgagccaggaagaaatgactaagaaccaagtctcattgacttgccttgtgaagggcttctacccatcggatatcgccgtggaatgggagtccaacggccagccggaaaacaactacaagaccacccctccggtgctggactcagacggatccttcttcctctactcgcggctgaccgtggataagagcagatggcaggagggaaatgtgttcagctgttctgtgatgcatgaagccctgcacaaccactacactcagaagtccctgtccctctccctggga

SEQ ID NO: 616 - protein, 107 aa, Artificial Sequence
  source: /note="Description of Artificial Sequence: Synthetic polypeptide"
AIQLTQSPSSLSASVGDRVTITCKASQDVGTAVAWYLQKPGQSPQLLIYWASTRHTGVPSRFSGSGSGTDFTFTISSLEAEDAATYYCQQYNSYPLTFGQGTKVEIK

SEQ ID NO: 617 - DNA, 321 bp, Artificial Sequence
  source: /note="Description of Artificial Sequence: Synthetic polynucleotide"
gctattcagctgactcagtcacctagtagcctgagcgctagtgtgggcgatagagtgactatcacctgtaaagcctctcaggacgtgggcaccgccgtggcctggtatctgcagaagcctggtcaatcacctcagctgctgatctactgggcctctactagacacaccggcgtgccctctaggtttagcggtagcggtagtggcaccgacttcaccttcactatctcttcactggaagccgaggacgccgctacctactactgtcagcagtataatagctaccccctgaccttcggtcaaggcactaaggtcgagattaag

SEQ ID NO: 618 - protein, 214 aa, Artificial Sequence
  source: /note="Description of Artificial Sequence: Synthetic polypeptide"
AIQLTQSPSSLSASVGDRVTITCKASQDVGTAVAWYLQKPGQSPQLLIYWASTRHTGVPSRFSGSGSGTDFTFTISSLEAEDAATYYCQQYNSYPLTFGQGTKVEIKRTVAAPSVFIFPPSDEQLKSGTASVVCLLNNFYPREAKVQWKVDNALQSGNSQESVTEQDSKDSTYSLSSTLTLSKADYEKHKVYACEVTHQGLSSPVTKSFNRGEC

SEQ ID NO: 619 - DNA, 642 bp, Artificial Sequence
  source: /note="Description of Artificial Sequence: Synthetic polynucleotide"
gctattcagctgactcagtcacctagtagcctgagcgctagtgtgggcgatagagtgactatcacctgtaaagcctctcaggacgtgggcaccgccgtggcctggtatctgcagaagcctggtcaatcacctcagctgctgatctactgggcctctactagacacaccggcgtgccctctaggtttagcggtagcggtagtggcaccgacttcaccttcactatctcttcactggaagccgaggacgccgctacctactactgtcagcagtataatagctaccccctgaccttcggtcaaggcactaaggtcgagattaagcgtacggtggccgctcccagcgtgttcatcttcccccccagcgacgagcagctgaagagcggcaccgccagcgtggtgtgcctgctgaacaacttctacccccgggaggccaaggtgcagtggaaggtggacaacgccctgcagagcggcaacagccaggagagcgtcaccgagcaggacagcaaggactccacctacagcctgagcagcaccctgaccctgagcaaggccgactacgagaagcataaggtgtacgcctgcgaggtgacccaccagggcctgtccagccccgtgaccaagagcttcaacaggggcgagtgc

SEQ ID NO: 620 - protein, 120 aa, Artificial Sequence
  source: /note="Description of Artificial Sequence: Synthetic polypeptide"
EVQLVQSGAEVKKPGATVKISCKVSGYTFTSYWMYWVRQATGQGLEWMGRIDPNSGSTKYNEKFKNRVTITADKSTSTAYMELSSLRSEDTAVYYCARDYRKGLYAMDYWGQGTTVTVSS

SEQ ID NO: 621 - DNA, 360 bp, Artificial Sequence
  source: /note="Description of Artificial Sequence: Synthetic polynucleotide"
gaagtgcagctggtgcagtcaggcgccgaagtgaagaaacccggcgctaccgtgaagattagctgtaaagtctcaggctacaccttcactagctactggatgtactgggtccgacaggctaccggtcaaggcctggagtggatgggtagaatcgaccctaatagcggctctactaagtataacgagaagtttaagaatagagtgactatcaccgccgataagtctactagcaccgcctatatggaactgtctagcctgagatcagaggacaccgccgtctactactgcgctagagactatagaaagggcctgtacgctatggactactggggtcaaggcactaccgtgaccgtgtcttca

SEQ ID NO: 622 - protein, 446 aa, Artificial Sequence
  source: /note="Description of Artificial Sequence: Synthetic polypeptide"
EVQLVQSGAEVKKPGATVKISCKVSGYTFTSYWMYWVRQATGQGLEWMGRIDPNSGSTKYNEKFKNRVTITADKSTSTAYMELSSLRSEDTAVYYCARDYRKGLYAMDYWGQGTTVTVSSASTKGPSVFPLAPCSRSTSESTAALGCLVKDYFPEPVTVSWNSGALTSGVHTFPAVLQSSGLYSLSSVVTVPSSSLGTKTYTCNVDHKPSNTKVDKRVESKYGPPCPPCPAPEFLGGPSVFLFPPKPKDTLMISRTPEVTCVVVDVSQEDPEVQFNWYVDGVEVHNAKTKPREEQFNSTYRVVSVLTVLHQDWLNGKEYKCKVSNKGLPSSIEKTISKAKGQPREPQVYTLPPSQEEMTKNQVSLTCLVKGFYPSDIAVEWESNGQPENNYKTTPPVLDSDGSFFLYSRLTVDKSRWQEGNVFSCSVMHEALHNHYTQKSLSLSLG

SEQ ID NO: 623 - DNA, 1338 bp, Artificial Sequence
  source: /note="Description of Artificial Sequence: Synthetic polynucleotide"
gaagtgcagctggtgcagtcaggcgccgaagtgaagaaacccggcgctaccgtgaagattagctgtaaagtctcaggctacaccttcactagctactggatgtactgggtccgacaggctaccggtcaaggcctggagtggatgggtagaatcgaccctaatagcggctctactaagtataacgagaagtttaagaatagagtgactatcaccgccgataagtctactagcaccgcctatatggaactgtctagcctgagatcagaggacaccgccgtctactactgcgctagagactatagaaagggcctgtacgctatggactactggggtcaaggcactaccgtgaccgtgtcttcagctagcactaagggcccgtccgtgttccccctggcaccttgtagccggagcactagcgaatccaccgctgccctcggctgcctggtcaaggattacttcccggagcccgtgaccgtgtcctggaacagcggagccctgacctccggagtgcacaccttccccgctgtgctgcagagctccgggctgtactcgctgtcgtcggtggtcacggtgccttcatctagcctgggtaccaagacctacacttgcaacgtggaccacaagccttccaacactaaggtggacaagcgcgtcgaatcgaagtacggcccaccgtgcccgccttgtcccgcgccggagttcctcggcggtccctcggtctttctgttcccaccgaagcccaaggacactttgatgatttcccgcacccctgaagtgacatgcgtggtcgtggacgtgtcacaggaagatccggaggtgcagttcaattggtacgtggatggcgtcgaggtgcacaacgccaaaaccaagccgagggaggagcagttcaactccacttaccgcgtcgtgtccgtgctgacggtgctgcatcaggactggctgaacgggaaggagtacaagtgcaaagtgtccaacaagggacttcctagctcaatcgaaaagaccatctcgaaagccaagggacagccccgggaaccccaagtgtataccctgccaccgagccaggaagaaatgactaagaaccaagtctcattgacttgccttgtgaagggcttctacccatcggatatcgccgtggaatgggagtccaacggccagccggaaaacaactacaagaccacccctccggtgctggactcagacggatccttcttcctctactcgcggctgaccgtggataagagcagatggcaggagggaaatgtgttcagctgttctgtgatgcatgaagccctgcacaaccactacactcagaagtccctgtccctctccctggga

SEQ ID NO: 624 - protein, 107 aa, Artificial Sequence
  source: /note="Description of Artificial Sequence: Synthetic polypeptide"
DVVMTQSPLSLPVTLGQPASISCKASQDVGTAVAWYQQKPGQAPRLLIYWASTRHTGVPSRFSGSGSGTEFTLTISSLQPDDFATYYCQQYNSYPLTFGQGTKVEIK

SEQ ID NO: 625 - DNA, 321 bp, Artificial Sequence
  source: /note="Description of Artificial Sequence: Synthetic polynucleotide"
gacgtcgtgatgactcagtcacccctgagcctgcccgtgaccctggggcagcccgcctctattagctgtaaagcctctcaggacgtgggcaccgccgtggcctggtatcagcagaagccagggcaagcccctagactgctgatctactgggcctctactagacacaccggcgtgccctctaggtttagcggtagcggtagtggcaccgagttcaccctgactatctcttcactgcagcccgacgacttcgctacctactactgtcagcagtataatagctaccccctgaccttcggtcaaggcactaaggtcgagattaag

SEQ ID NO: 626 - protein, 214 aa, Artificial Sequence
  source: /note="Description of Artificial Sequence: Synthetic polypeptide"
DVVMTQSPLSLPVTLGQPASISCKASQDVGTAVAWYQQKPGQAPRLLIYWASTRHTGVPSRFSGSGSGTEFTLTISSLQPDDFATYYCQQYNSYPLTFGQGTKVEIKRTVAAPSVFIFPPSDEQLKSGTASVVCLLNNFYPREAKVQWKVDNALQSGNSQESVTEQDSKDSTYSLSSTLTLSKADYEKHKVYACEVTHQGLSSPVTKSFNRGEC

SEQ ID NO: 627 - DNA, 642 bp, Artificial Sequence
  source: /note="Description of Artificial Sequence: Synthetic polynucleotide"
gacgtcgtgatgactcagtcacccctgagcctgcccgtgaccctggggcagcccgcctctattagctgtaaagcctctcaggacgtgggcaccgccgtggcctggtatcagcagaagccagggcaagcccctagactgctgatctactgggcctctactagacacaccggcgtgccctctaggtttagcggtagcggtagtggcaccgagttcaccctgactatctcttcactgcagcccgacgacttcgctacctactactgtcagcagtataatagctaccccctgaccttcggtcaaggcactaaggtcgagattaagcgtacggtggccgctcccagcgtgttcatcttcccccccagcgacgagcagctgaagagcggcaccgccagcgtggtgtgcctgctgaacaacttctacccccgggaggccaaggtgcagtggaaggtggacaacgccctgcagagcggcaacagccaggagagcgtcaccgagcaggacagcaaggactccacctacagcctgagcagcaccctgaccctgagcaaggccgactacgagaagcataaggtgtacgcctgcgaggtgacccaccagggcctgtccagccccgtgaccaagagcttcaacaggggcgagtgc

SEQ ID NO: 628 - DNA, 15 bp, Artificial Sequence
  source: /note="Description of Artificial Sequence: Synthetic oligonucleotide"
agctactggatgtac

SEQ ID NO: 629 - DNA, 51 bp, Artificial Sequence
  source: /note="Description of Artificial Sequence: Synthetic oligonucleotide"
agaatcgaccctaatagcggctctactaagtataacgagaagtttaagaat

SEQ ID NO: 630 - DNA, 33 bp, Artificial Sequence
  source: /note="Description of Artificial Sequence: Synthetic oligonucleotide"
gactatagaaagggcctgtacgctatggactac

SEQ ID NO: 631 - DNA, 21 bp, Artificial Sequence
  source: /note="Description of Artificial Sequence: Synthetic oligonucleotide"
ggctacaccttcactagctac

SEQ ID NO: 632 - DNA, 18 bp, Artificial Sequence
  source: /note="Description of Artificial Sequence: Synthetic oligonucleotide"
gaccctaatagcggctct

SEQ ID NO: 633 - DNA, 33 bp, Artificial Sequence
  source: /note="Description of Artificial Sequence: Synthetic oligonucleotide"
aaagcctctcaggacgtgggcaccgccgtggcc

SEQ ID NO: 634 - DNA, 21 bp, Artificial Sequence
  source: /note="Description of Artificial Sequence: Synthetic oligonucleotide"
tgggcctctactagacacacc

SEQ ID NO: 635 - DNA, 27 bp, Artificial Sequence
  source: /note="Description of Artificial Sequence: Synthetic oligonucleotide"
cagcagtataatagctaccccctgacc

SEQ ID NO: 636 - DNA, 21 bp, Artificial Sequence
  source: /note="Description of Artificial Sequence: Synthetic oligonucleotide"
tctcaggacgtgggcaccgcc

SEQ ID NO: 637 - DNA, 9 bp, Artificial Sequence
  source: /note="Description of Artificial Sequence: Synthetic oligonucleotide"
tgggcctct

SEQ ID NO: 638 - DNA, 18 bp, Artificial Sequence
  source: /note="Description of Artificial Sequence: Synthetic oligonucleotide"
tataatagctaccccctg

SEQ ID NO: 639 - protein, 448 aa, Artificial Sequence
  source: /note="Description of Artificial Sequence: Synthetic polypeptide"
EVQLVESGGGLVQPGGSLRLSCAASGFTFSDSWIHWVRQAPGKGLEWVAWISPYGGSTYYADSVKGRFTISADTSKNTAYLQMNSLRAEDTAVYYCARRHWPGGFDYWGQGTLVTVSSASTKGPSVFPLAPSSKSTSGGTAALGCLVKDYFPEPVTVSWNSGALTSGVHTFPAVLQSSGLYSLSSVVTVPSSSLGTQTYICNVNHKPSNTKVDKKVEPKSCDKTHTCPPCPAPELLGGPSVFLFPPKPKDTLMISRTPEVTCVVVDVSHEDPEVKFNWYVDGVEVHNAKTKPREEQYASTYRVVSVLTVLHQDWLNGKEYKCKVSNKALPAPIEKTISKAKGQPREPQVYTLPPSREEMTKNQVSLTCLVKGFYPSDIAVEWESNGQPENNYKTTPPVLDSDGSFFLYSKLTVDKSRWQQGNVFSCSVMHEALHNHYTQKSLSLSPGK

SEQ ID NO: 640 - protein, 214 aa, Artificial Sequence
  source: /note="Description of Artificial Sequence: Synthetic polypeptide"
DIQMTQSPSSLSASVGDRVTITCRASQDVSTAVAWYQQKPGKAPKLLIYSASFLYSGVPSRFSGSGSGTDFTLTISSLQPEDFATYYCQQYLYHPATFGQGTKVEIKRTVAAPSVFIFPPSDEQLKSGTASVVCLLNNFYPREAKVQWKVDNALQSGNSQESVTEQDSKDSTYSLSSTLTLSKADYEKHKVYACEVTHQGLSSPVTKSFNRGEC

SEQ ID NO: 641 - protein, 450 aa, Artificial Sequence
  source: /note="Description of Artificial Sequence: Synthetic polypeptide"
EVQLLESGGGLVQPGGSLRLSCAASGFTFSSYIMMWVRQAPGKGLEWVSSIYPSGGITFYADTVKGRFTISRDNSKNTLYLQMNSLRAEDTAVYYCARIKLGTVTTVDYWGQGTLVTVSSASTKGPSVFPLAPSSKSTSGGTAALGCLVKDYFPEPVTVSWNSGALTSGVHTFPAVLQSSGLYSLSSVVTVPSSSLGTQTYICNVNHKPSNTKVDKKVEPKSCDKTHTCPPCPAPELLGGPSVFLFPPKPKDTLMISRTPEVTCVVVDVSHEDPEVKFNWYVDGVEVHNAKTKPREEQYNSTYRVVSVLTVLHQDWLNGKEYKCKVSNKALPAPIEKTISKAKGQPREPQVYTLPPSRDELTKNQVSLTCLVKGFYPSDIAVEWESNGQPENNYKTTPPVLDSDGSFFLYSKLTVDKSRWQQGNVFSCSVMHEALHNHYTQKSLSLSPGK

SEQ ID NO: 642 - protein, 216 aa, Artificial Sequence
  source: /note="Description of Artificial Sequence: Synthetic polypeptide"
QSALTQPASVSGSPGQSITISCTGTSSDVGGYNYVSWYQQHPGKAPKLMIYDVSNRPSGVSNRFSGSKSGNTASLTISGLQAEDEADYYCSSYTSSSTRVFGTGTKVTVLGQPKANPTVTLFPPSSEELQANKATLVCLISDFYPGAVTVAWKADGSPVKAGVETTKPSKQSNNKYAASSYLSLTPEQWKSHRSYSCQVTHEGSTVEKTVAPTECS

SEQ ID NO: 643 - protein, 451 aa, Artificial Sequence
  source: /note="Description of Artificial Sequence: Synthetic polypeptide"
EVQLVESGGGLVQPGGSLRLSCAASGFTFSRYWMSWVRQAPGKGLEWVANIKQDGSEKYYVDSVKGRFTISRDNAKNSLYLQMNSLRAEDTAVYYCAREGGWFGELAFDYWGQGTLVTVSSASTKGPSVFPLAPSSKSTSGGTAALGCLVKDYFPEPVTVSWNSGALTSGVHTFPAVLQSSGLYSLSSVVTVPSSSLGTQTYICNVNHKPSNTKVDKRVEPKSCDKTHTCPPCPAPEFEGGPSVFLFPPKPKDTLMISRTPEVTCVVVDVSHEDPEVKFNWYVDGVEVHNAKTKPREEQYNSTYRVVSVLTVLHQDWLNGKEYKCKVSNKALPASIEKTISKAKGQPREPQVYTLPPSREEMTKNQVSLTCLVKGFYPSDIAVEWESNGQPENNYKTTPPVLDSDGSFFLYSKLTVDKSRWQQGNVFSCSVMHEALHNHYTQKSLSLSPGK

SEQ ID NO: 644 - protein, 215 aa, Artificial Sequence
  source: /note="Description of Artificial Sequence: Synthetic polypeptide"
EIVLTQSPGTLSLSPGERATLSCRASQRVSSSYLAWYQQKPGQAPRLLIYDASSRATGIPDRFSGSGSGTDFTLTISRLEPEDFAVYYCQQYGSLPWTFGQGTKVEIKRTVAAPSVFIFPPSDEQLKSGTASVVCLLNNFYPREAKVQWKVDNALQSGNSQESVTEQDSKDSTYSLSSTLTLSKADYEKHKVYACEVTHQGLSSPVTKSFNRGEC

SEQ ID NO: 645 - protein, 123 aa, Artificial Sequence
  source: /note="Description of Artificial Sequence: Synthetic polypeptide"
QVQLVQSGAEVKKPGSSVKVSCKTSGDTFSTYAISWVRQAPGQGLEWMGGIIPIFGKAHYAQKFQGRVTITADESTSTAYMELSSLRSEDTAVYFCARKFHFVSGSPFGMDVWGQGTTVTVSS

SEQ ID NO: 646 - protein, 106 aa, Artificial Sequence
  source: /note="Description of Artificial Sequence: Synthetic polypeptide"
EIVLTQSPATLSLSPGERATLSCRASQSVSSYLAWYQQKPGQAPRLLIYDASNRATGIPARFSGSGSGTDFTLTISSLEPEDFAVYYCQQRSNWPTFGQGTKVEIK

SEQ ID NO: 647 - protein, 10 aa, Artificial Sequence
  source: /note="Description of Artificial Sequence: Synthetic peptide"
GYTFTSYWMY

SEQ ID NO: 648-700 - skipped (53 entries)

SEQ ID NO: 701 - protein, 5 aa, Artificial Sequence
  source: /note="Description of Artificial Sequence: Synthetic peptide"
NYGMN

SEQ ID NO: 702 - protein, 17 aa, Artificial Sequence
  source: /note="Description of Artificial Sequence: Synthetic peptide"
WINTDTGEPTYADDFKG

SEQ ID NO: 703 - protein, 16 aa, Artificial Sequence
  source: /note="Description of Artificial Sequence: Synthetic peptide"
NPPYYYGTNNAEAMDY

SEQ ID NO: 704 - protein, 7 aa, Artificial Sequence
  source: /note="Description of Artificial Sequence: Synthetic peptide"
GFTLTNY

SEQ ID NO: 705 - protein, 6 aa, Artificial Sequence
  source: /note="Description of Artificial Sequence: Synthetic peptide"
NTDTGE

SEQ ID NO: 706 - protein, 125 aa, Artificial Sequence
  source: /note="Description of Artificial Sequence: Synthetic polypeptide"
QVQLVQSGAEVKKPGASVKVSCKASGFTLTNYGMNWVRQARGQRLEWIGWINTDTGEPTYADDFKGRFVFSLDTSVSTAYLQISSLKAEDTAVYYCARNPPYYYGTNNAEAMDYWGQGTTVTVSS

SEQ ID NO: 707 - DNA, 375 bp, Artificial Sequence
  source: /note="Description of Artificial Sequence: Synthetic polynucleotide"
caagtgcagctggtgcagtcgggagccgaagtgaagaagcctggagcctcggtgaaggtgtcgtgcaaggcatccggattcaccctcaccaattacgggatgaactgggtcagacaggcccggggtcaacggctggagtggatcggatggattaacaccgacaccggggagcctacctacgcggacgatttcaagggacggttcgtgttctccctcgacacctccgtgtccaccgcctacctccaaatctcctcactgaaagcggaggacaccgccgtgtactattgcgcgaggaacccgccctactactacggaaccaacaacgccgaagccatggactactggggccagggcaccactgtgactgtgtccagc

SEQ ID NO: 708 - DNA, 375 bp, Artificial Sequence
  source: /note="Description of Artificial Sequence: Synthetic polynucleotide"
caggtgcagctggtgcagtctggcgccgaagtgaagaaacctggcgcctccgtgaaggtgtcctgcaaggcctctggcttcaccctgaccaactacggcatgaactgggtgcgacaggccaggggccagcggctggaatggatcggctggatcaacaccgacaccggcgagcctacctacgccgacgacttcaagggcagattcgtgttctccctggacacctccgtgtccaccgcctacctgcagatctccagcctgaaggccgaggataccgccgtgtactactgcgcccggaaccccccttactactacggcaccaacaacgccgaggccatggactattggggccagggcaccaccgtgaccgtgtcctct

SEQ ID NO: 709 - protein, 451 aa, Artificial Sequence
  source: /note="Description of Artificial Sequence: Synthetic polypeptide"
QVQLVQSGAEVKKPGASVKVSCKASGFTLTNYGMNWVRQARGQRLEWIGWINTDTGEPTYADDFKGRFVFSLDTSVSTAYLQISSLKAEDTAVYYCARNPPYYYGTNNAEAMDYWGQGTTVTVSSASTKGPSVFPLAPCSRSTSESTAALGCLVKDYFPEPVTVSWNSGALTSGVHTFPAVLQSSGLYSLSSVVTVPSSSLGTKTYTCNVDHKPSNTKVDKRVESKYGPPCPPCPAPEFLGGPSVFLFPPKPKDTLMISRTPEVTCVVVDVSQEDPEVQFNWYVDGVEVHNAKTKPREEQFNSTYRVVSVLTVLHQDWLNGKEYKCKVSNKGLPSSIEKTISKAKGQPREPQVYTLPPSQEEMTKNQVSLTCLVKGFYPSDIAVEWESNGQPENNYKTTPPVLDSDGSFFLYSRLTVDKSRWQEGNVFSCSVMHEALHNHYTQKSLSLSLG

SEQ ID NO: 710 - protein, 11 aa, Artificial Sequence
  source: /note="Description of Artificial Sequence: Synthetic peptide"
SSSQDISNYLN

SEQ ID NO: 711 - protein, 7 aa, Artificial Sequence
  source: /note="Description of Artificial Sequence: Synthetic peptide"
YTSTLHL

SEQ ID NO: 712 - protein, 9 aa, Artificial Sequence
  source: /note="Description of Artificial Sequence: Synthetic peptide"
QQYYNLPWT

SEQ ID NO: 713 - protein, 7 aa, Artificial Sequence
  source: /note="Description of Artificial Sequence: Synthetic peptide"
SQDISNY

SEQ ID NO: 714 - protein, 3 aa, Artificial Sequence
  source: /note="Description of Artificial Sequence: Synthetic peptide"
YTS

SEQ ID NO: 715 - protein, 6 aa, Artificial Sequence
  source: /note="Description of Artificial Sequence: Synthetic peptide"
YYNLPW

SEQ ID NO: 716 - DNA, 1353 bp, Artificial Sequence
  source: /note="Description of Artificial Sequence: Synthetic polynucleotide"
caagtgcagctggtgcagtcgggagccgaagtgaagaagcctggagcctcggtgaaggtgtcgtgcaaggcatccggattcaccctcaccaattacgggatgaactgggtcagacaggcccggggtcaacggctggagtggatcggatggattaacaccgacaccggggagcctacctacgcggacgatttcaagggacggttcgtgttctccctcgacacctccgtgtccaccgcctacctccaaatctcctcactgaaagcggaggacaccgccgtgtactattgcgcgaggaacccgccctactactacggaaccaacaacgccgaagccatggactactggggccagggcaccactgtgactgtgtccagcgcgtccactaagggcccgtccgtgttccccctggcaccttgtagccggagcactagcgaatccaccgctgccctcggctgcctggtcaaggattacttcccggagcccgtgaccgtgtcctggaacagcggagccctgacctccggagtgcacaccttccccgctgtgctgcagagctccgggctgtactcgctgtcgtcggtggtcacggtgccttcatctagcctgggtaccaagacctacacttgcaacgtggaccacaagccttccaacactaaggtggacaagcgcgtcgaatcgaagtacggcccaccgtgcccgccttgtcccgcgccggagttcctcggcggtccctcggtctttctgttcccaccgaagcccaaggacactttgatgatttcccgcacccctgaagtgacatgcgtggtcgtggacgtgtcacaggaagatccggaggtgcagttcaattggtacgtggatggcgtcgaggtgcacaacgccaaaaccaagccgagggaggagcagttcaactccacttaccgcgtcgtgtccgtgctgacggtgctgcatcaggactggctgaacgggaaggagtacaagtgcaaagtgtccaacaagggacttcctagctcaatcgaaaagaccatctcgaaagccaagggacagccccgggaaccccaagtgtataccctgccaccgagccaggaagaaatgactaagaaccaagtctcattgacttgccttgtgaagggcttctacccatcggatatcgccgtggaatgggagtccaacggccagccggaaaacaactacaagaccacccctccggtgctggactcagacggatccttcttcctctactcgcggctgaccgtggataagagcagatggcaggagggaaatgtgttcagctgttctgtgatgcatgaagccctgcacaaccactacactcagaagtccctgtccctctccctggga

SEQ ID NO: 717 - DNA, 1353 bp, Artificial Sequence
  source: /note="Description of Artificial Sequence: Synthetic polynucleotide"
caggtgcagctggtgcagtctggcgccgaagtgaagaaacctggcgcctccgtgaaggtgtcctgcaaggcctctggcttcaccctgaccaactacggcatgaactgggtgcgacaggccaggggccagcggctggaatggatcggctggatcaacaccgacaccggcgagcctacctacgccgacgacttcaagggcagattcgtgttctccctggacacctccgtgtccaccgcctacctgcagatctccagcctgaaggccgaggataccgccgtgtactactgcgcccggaaccccccttactactacggcaccaacaacgccgaggccatggactattggggccagggcaccaccgtgaccgtgtcctctgcttctaccaaggggcccagcgtgttccccctggccccctgctccagaagcaccagcgagagcacagccgccctgggctgcctggtgaaggactacttccccgagcccgtgaccgtgtcctggaacagcggagccctgaccagcggcgtgcacaccttccccgccgtgctgcagagcagcggcctgtacagcctgagcagcgtggtgaccgtgcccagcagcagcctgggcaccaagacctacacctgtaacgtggaccacaagcccagcaacaccaaggtggacaagagggtggagagcaagtacggcccaccctgccccccctgcccagcccccgagttcctgggcggacccagcgtgttcctgttcccccccaagcccaaggacaccctgatgatcagcagaacccccgaggtgacctgtgtggtggtggacgtgtcccaggaggaccccgaggtccagttcaactggtacgtggacggcgtggaggtgcacaacgccaagaccaagcccagagaggagcagtttaacagcacctaccgggtggtgtccgtgctgaccgtgctgcaccaggactggctgaacggcaaagagtacaagtgtaaggtctccaacaagggcctgccaagcagcatcgaaaagaccatcagcaaggccaagggccagcctagagagccccaggtctacaccctgccacccagccaagaggagatgaccaagaaccaggtgtccctgacctgtctggtgaagggcttctacccaagcgacatcgccgtggagtgggagagcaacggccagcccgagaacaactacaagaccacccccccagtgctggacagcgacggcagcttcttcctgtacagcaggctgaccgtggacaagtccagatggcaggagggcaacgtctttagctgctccgtgatgcacgaggccctgcacaaccactacacccagaagagcctgagcctgtccctgggc

SEQ ID NO: 718 - protein, 107 aa, Artificial Sequence
  source: /note="Description of Artificial Sequence: Synthetic polypeptide"
DIQMTQSPSSLSASVGDRVTITCSSSQDISNYLNWYLQKPGQSPQLLIYYTSTLHLGVPSRFSGSGSGTEFTLTISSLQPDDFATYYCQQYYNLPWTFGQGTKVEIK

SEQ ID NO: 719 - DNA, 321 bp, Artificial Sequence
  source: /note="Description of Artificial Sequence: Synthetic polynucleotide"
gatattcagatgactcagtcacctagtagcctgagcgctagtgtgggcgatagagtgactatcacctgtagctctagtcaggatatctctaactacctgaactggtatctgcagaagcccggtcaatcacctcagctgctgatctactacactagcaccctgcacctgggcgtgccctctaggtttagcggtagcggtagtggcaccgagttcaccctgactatctctagcctgcagcccgacgacttcgctacctactactgtcagcagtactataacctgccctggaccttcggtcaaggcactaaggtcgagattaag

SEQ ID NO: 720 - DNA, 321 bp, Artificial Sequence
  source: /note="Description of Artificial Sequence: Synthetic polynucleotide"
gacatccagatgacccagtccccctccagcctgtctgcttccgtgggcgacagagtgaccatcacctgttcctccagccaggacatctccaactacctgaactggtatctgcagaagcccggccagtcccctcagctgctgatctactacacctccaccctgcacctgggcgtgccctccagattttccggctctggctctggcaccgagtttaccctgaccatcagctccctgcagcccgacgacttcgccacctactactgccagcagtactacaacctgccctggaccttcggccagggcaccaaggtggaaatcaag

SEQ ID NO: 721 - protein, 214 aa, Artificial Sequence
  source: /note="Description of Artificial Sequence: Synthetic polypeptide"
DIQMTQSPSSLSASVGDRVTITCSSSQDISNYLNWYLQKPGQSPQLLIYYTSTLHLGVPSRFSGSGSGTEFTLTISSLQPDDFATYYCQQYYNLPWTFGQGTKVEIKRTVAAPSVFIFPPSDEQLKSGTASVVCLLNNFYPREAKVQWKVDNALQSGNSQESVTEQDSKDSTYSLSSTLTLSKADYEKHKVYACEVTHQGLSSPVTKSFNRGEC

SEQ ID NO: 722 - DNA, 642 bp, Artificial Sequence
  source: /note="Description of Artificial Sequence: Synthetic polynucleotide"
gatattcagatgactcagtcacctagtagcctgagcgctagtgtgggcgatagagtgactatcacctgtagctctagtcaggatatctctaactacctgaactggtatctgcagaagcccggtcaatcacctcagctgctgatctactacactagcaccctgcacctgggcgtgccctctaggtttagcggtagcggtagtggcaccgagttcaccctgactatctctagcctgcagcccgacgacttcgctacctactactgtcagcagtactataacctgccctggaccttcggtcaaggcactaaggtcgagattaagcgtacggtggccgctcccagcgtgttcatcttcccccccagcgacgagcagctgaagagcggcaccgccagcgtggtgtgcctgctgaacaacttctacccccgggaggccaaggtgcagtggaaggtggacaacgccctgcagagcggcaacagccaggagagcgtcaccgagcaggacagcaaggactccacctacagcctgagcagcaccctgaccctgagcaaggccgactacgagaagcataaggtgtacgcctgcgaggtgacccaccagggcctgtccagccccgtgaccaagagcttcaacaggggcgagtgc

SEQ ID NO: 723 - DNA, 642 bp, Artificial Sequence
  source: /note="Description of Artificial Sequence: Synthetic polynucleotide"
gacatccagatgacccagtccccctccagcctgtctgcttccgtgggcgacagagtgaccatcacctgttcctccagccaggacatctccaactacctgaactggtatctgcagaagcccggccagtcccctcagctgctgatctactacacctccaccctgcacctgggcgtgccctccagattttccggctctggctctggcaccgagtttaccctgaccatcagctccctgcagcccgacgacttcgccacctactactgccagcagtactacaacctgccctggaccttcggccagggcaccaaggtggaaatcaagcgtacggtggccgctcccagcgtgttcatcttccccccaagcgacgagcagctgaagagcggcaccgccagcgtggtgtgtctgctgaacaacttctaccccagggaggccaaggtgcagtggaaggtggacaacgccctgcagagcggcaacagccaggagagcgtcaccgagcaggacagcaaggactccacctacagcctgagcagcaccctgaccctgagcaaggccgactacgagaagcacaaggtgtacgcctgtgaggtgacccaccagggcctgtccagccccgtgaccaagagcttcaacaggggcgagtgc

SEQ ID NO: 724 - protein, 125 aa, Artificial Sequence
  source: /note="Description of Artificial Sequence: Synthetic polypeptide"
QVQLVQSGAEVKKPGASVKVSCKASGFTLTNYGMNWVRQAPGQGLEWMGWINTDTGEPTYADDFKGRFVFSLDTSVSTAYLQISSLKAEDTAVYYCARNPPYYYGTNNAEAMDYWGQGTTVTVSS

SEQ ID NO: 725 - DNA, 375 bp, Artificial Sequence
  source: /note="Description of Artificial Sequence: Synthetic polynucleotide"
caggtgcagctggtgcagtcaggcgccgaagtgaagaaacccggcgctagtgtgaaagtcagctgtaaagctagtggcttcaccctgactaactacgggatgaactgggtccgccaggccccaggtcaaggcctcgagtggatgggctggattaacaccgacaccggcgagcctacctacgccgacgactttaagggcagattcgtgtttagcctggacactagtgtgtctaccgcctacctgcagatctctagcctgaaggccgaggacaccgccgtctactactgcgctagaaaccccccctactactacggcactaacaacgccgaggctatggactactggggtcaaggcactaccgtgaccgtgtctagc

SEQ ID NO: 726 - DNA, 375 bp, Artificial Sequence
  source: /note="Description of Artificial Sequence: Synthetic polynucleotide"
caggtgcagctggtgcagtctggcgccgaagtgaagaaacctggcgcctccgtgaaggtgtcctgcaaggcctctggcttcaccctgaccaactacggcatgaactgggtgcgacaggcccctggacagggcctggaatggatgggctggatcaacaccgacaccggcgagcctacctacgccgacgacttcaagggcagattcgtgttctccctggacacctccgtgtccaccgcctacctgcagatctccagcctgaaggccgaggataccgccgtgtactactgcgcccggaaccccccttactactacggcaccaacaacgccgaggccatggactattggggccagggcaccaccgtgaccgtgtcctct

SEQ ID NO: 727 - protein, 451 aa, Artificial Sequence
  source: /note="Description of Artificial Sequence: Synthetic polypeptide"
QVQLVQSGAEVKKPGASVKVSCKASGFTLTNYGMNWVRQAPGQGLEWMGWINTDTGEPTYADDFKGRFVFSLDTSVSTAYLQISSLKAEDTAVYYCARNPPYYYGTNNAEAMDYWGQGTTVTVSSASTKGPSVFPLAPCSRSTSESTAALGCLVKDYFPEPVTVSWNSGALTSGVHTFPAVLQSSGLYSLSSVVTVPSSSLGTKTYTCNVDHKPSNTKVDKRVESKYGPPCPPCPAPEFLGGPSVFLFPPKPKDTLMISRTPEVTCVVVDVSQEDPEVQFNWYVDGVEVHNAKTKPREEQFNSTYRVVSVLTVLHQDWLNGKEYKCKVSNKGLPSSIEKTISKAKGQPREPQVYTLPPSQEEMTKNQVSLTCLVKGFYPSDIAVEWESNGQPENNYKTTPPVLDSDGSFFLYSRLTVDKSRWQEGNVFSCSVMHEALHNHYTQKSLSLSLG

SEQ ID NO: 728 - DNA, 1353 bp, Artificial Sequence
  source: /note="Description of Artificial Sequence: Synthetic polynucleotide"
caggtgcagctggtgcagtcaggcgccgaagtgaagaaacccggcgctagtgtgaaagtcagctgtaaagctagtggcttcaccctgactaactacgggatgaactgggtccgccaggccccaggtcaaggcctcgagtggatgggctggattaacaccgacaccggcgagcctacctacgccgacgactttaagggcagattcgtgtttagcctggacactagtgtgtctaccgcctacctgcagatctctagcctgaaggccgaggacaccgccgtctactactgcgctagaaaccccccctactactacggcactaacaacgccgaggctatggactactggggtcaaggcactaccgtgaccgtgtctagcgctagcactaagggcccgtccgtgttccccctggcaccttgtagccggagcactagcgaatccaccgctgccctcggctgcctggtcaaggattacttcccggagcccgtgaccgtgtcctggaacagcggagccctgacctccggagtgcacaccttccccgctgtgctgcagagctccgggctgtactcgctgtcgtcggtggtcacggtgccttcatctagcctgggtaccaagacctacacttgcaacgtggaccacaagccttccaacactaaggtggacaagcgcgtcgaatcgaagtacggcccaccgtgcccgccttgtcccgcgccggagttcctcggcggtccctcggtctttctgttcccaccgaagcccaaggacactttgatgatttcccgcacccctgaagtgacatgcgtggtcgtggacgtgtcacaggaagatccggaggtgcagttcaattggtacgtggatggcgtcgaggtgcacaacgccaaaaccaagccgagggaggagcagttcaactccacttaccgcgtcgtgtccgtgctgacggtgctgcatcaggactggctgaacgggaaggagtacaagtgcaaagtgtccaacaagggacttcctagctcaatcgaaaagaccatctcgaaagccaagggacagccccgggaaccccaagtgtataccctgccaccgagccaggaagaaatgactaagaaccaagtctcattgacttgccttgtgaagggcttctacccatcggatatcgccgtggaatgggagtccaacggccagccggaaaacaactacaagaccacccctccggtgctggactcagacggatccttcttcctctactcgcggctgaccgtggataagagcagatggcaggagggaaatgtgttcagctgttctgtgatgcatgaagccctgcacaaccactacactcagaagtccctgtccctctccctggga

SEQ ID NO: 729 - DNA, 1353 bp, Artificial Sequence
  source: /note="Description of Artificial Sequence: Synthetic polynucleotide"
caggtgcagctggtgcagtctggcgccgaagtgaagaaacctggcgcctccgtgaaggtgtcctgcaaggcctctggcttcaccctgaccaactacggcatgaactgggtgcgacaggcccctggacagggcctggaatggatgggctggatcaacaccgacaccggcgagcctacctacgccgacgacttcaagggcagattcgtgttctccctggacacctccgtgtccaccgcctacctgcagatctccagcctgaaggccgaggataccgccgtgtactactgcgcccggaaccccccttactactacggcaccaacaacgccgaggccatggactattggggccagggcaccaccgtgaccgtgtcctctgcttctaccaaggggcccagcgtgttccccctggccccctgctccagaagcaccagcgagagcacagccgccctgggctgcctggtgaaggactacttccccgagcccgtgaccgtgtcctggaacagcggagccctgaccagcggcgtgcacaccttccccgccgtgctgcagagcagcggcctgtacagcctgagcagcgtggtgaccgtgcccagcagcagcctgggcaccaagacctacacctgtaacgtggaccacaagcccagcaacaccaaggtggacaagagggtggagagcaagtacggcccaccctgccccccctgcccagcccccgagttcctgggcggacccagcgtgttcctgttcccccccaagcccaaggacaccctgatgatcagcagaacccccgaggtgacctgtgtggtggtggacgtgtcccaggaggaccccgaggtccagttcaactggtacgtggacggcgtggaggtgcacaacgccaagaccaagcccagagaggagcagtttaacagcacctaccgggtggtgtccgtgctgaccgtgctgcaccaggactggctgaacggcaaagagtacaagtgtaaggtctccaacaagggcctgccaagcagcatcgaaaagaccatcagcaaggccaagggccagcctagagagccccaggtctacaccctgccacccagccaagaggagatgaccaagaaccaggtgtccctgacctgtctggtgaagggcttctacccaagcgacatcgccgtggagtgggagagcaacggccagcccgagaacaactacaagaccacccccccagtgctggacagcgacggcagcttcttcctgtacagcaggctgaccgtggacaagtccagatggcaggagggcaacgtctttagctgctccgtgatgcacgaggccctgcacaaccactacacccagaagagcctgagcctgtccctgggc

SEQ ID NO: 730 - protein, 107 aa, Artificial Sequence
  source: /note="Description of Artificial Sequence: Synthetic polypeptide"
DIQMTQSPSSLSASVGDRVTITCSSSQDISNYLNWYQQKPGKAPKLLIYYTSTLHLGIPPRFSGSGYGTDFTLTINNIESEDAAYYFCQQYYNLPWTFGQGTKVEIK

SEQ ID NO: 731 - DNA, 321 bp, Artificial Sequence
  source: /note="Description of Artificial Sequence: Synthetic polynucleotide"
gatattcagatgactcagtcacctagtagcctgagcgctagtgtgggcgatagagtgactatcacctgtagctctagtcaggatatctctaactacctgaactggtatcagcagaagcccggtaaagcccctaagctgctgatctactacactagcaccctgcacctgggaatcccccctaggtttagcggtagcggctacggcaccgacttcaccctgactattaacaatatcgagtcagaggacgccgcctactacttctgtcagcagtactataacctgccctggaccttcggtcaaggcactaaggtcgagattaag

SEQ ID NO: 732 - DNA, 321 bp, Artificial Sequence
  source: /note="Description of Artificial Sequence: Synthetic polynucleotide"
gacatccagatgacccagtccccctccagcctgtctgcttccgtgggcgacagagtgaccatcacctgttcctccagccaggacatctccaactacctgaactggtatcagcagaagcccggcaaggcccccaagctgctgatctactacacctccaccctgcacctgggcatcccccctagattctccggctctggctacggcaccgacttcaccctgaccatcaacaacatcgagtccgaggacgccgcctactacttctgccagcagtactacaacctgccctggaccttcggccagggcaccaaggtggaaatcaag

SEQ ID NO: 733 - protein, 214 aa, Artificial Sequence
  source: /note="Description of Artificial Sequence: Synthetic polypeptide"
DIQMTQSPSSLSASVGDRVTITCSSSQDISNYLNWYQQKPGKAPKLLIYYTSTLHLGIPPRFSGSGYGTDFTLTINNIESEDAAYYFCQQYYNLPWTFGQGTKVEIKRTVAAPSVFIFPPSDEQLKSGTASVVCLLNNFYPREAKVQWKVDNALQSGNSQESVTEQDSKDSTYSLSSTLTLSKADYEKHKVYACEVTHQGLSSPVTKSFNRGEC

SEQ ID NO: 734 - DNA, 642 bp, Artificial Sequence
  source: /note="Description of Artificial Sequence: Synthetic polynucleotide"
gatattcagatgactcagtcacctagtagcctgagcgctagtgtgggcgatagagtgactatcacctgtagctctagtcaggatatctctaactacctgaactggtatcagcagaagcccggtaaagcccctaagctgctgatctactacactagcaccctgcacctgggaatcccccctaggtttagcggtagcggctacggcaccgacttcaccctgactattaacaatatcgagtcagaggacgccgcctactacttctgtcagcagtactataacctgccctggaccttcggtcaaggcactaaggtcgagattaagcgtacggtggccgctcccagcgtgttcatcttcccccccagcgacgagcagctgaagagcggcaccgccagcgtggtgtgcctgctgaacaacttctacccccgggaggccaaggtgcagtggaaggtggacaacgccctgcagagcggcaacagccaggagagcgtcaccgagcaggacagcaaggactccacctacagcctgagcagcaccctgaccctgagcaaggccgactacgagaagcataaggtgtacgcctgcgaggtgacccaccagggcctgtccagccccgtgaccaagagcttcaacaggggcgagtgc

SEQ ID NO: 735 - DNA, 642 bp, Artificial Sequence
  source: /note="Description of Artificial Sequence: Synthetic polynucleotide"
gacatccagatgacccagtccccctccagcctgtctgcttccgtgggcgacagagtgaccatcacctgttcctccagccaggacatctccaactacctgaactggtatcagcagaagcccggcaaggcccccaagctgctgatctactacacctccaccctgcacctgggcatcccccctagattctccggctctggctacggcaccgacttcaccctgaccatcaacaacatcgagtccgaggacgccgcctactacttctgccagcagtactacaacctgccctggaccttcggccagggcaccaaggtggaaatcaagcgtacggtggccgctcccagcgtgttcatcttccccccaagcgacgagcagctgaagagcggcaccgccagcgtggtgtgtctgctgaacaacttctaccccagggaggccaaggtgcagtggaaggtggacaacgccctgcagagcggcaacagccaggagagcgtcaccgagcaggacagcaaggactccacctacagcctgagcagcaccctgaccctgagcaaggccgactacgagaagcacaaggtgtacgcctgtgaggtgacccaccagggcctgtccagccccgtgaccaagagcttcaacaggggcgagtgc

SEQ ID NO: 736 - DNA, 15 bp, Artificial Sequence
  source: /note="Description of Artificial Sequence: Synthetic oligonucleotide"
aattacgggatgaac

SEQ ID NO: 737 - DNA, 15 bp, Artificial Sequence
  source: /note="Description of Artificial Sequence: Synthetic oligonucleotide"
aactacggcatgaac

SEQ ID NO: 738 - DNA, 51 bp, Artificial Sequence
  source: /note="Description of Artificial Sequence: Synthetic oligonucleotide"
tggattaacaccgacaccggggagcctacctacgcggacgatttcaaggga

SEQ ID NO: 739 - DNA, 51 bp, Artificial Sequence
  source: /note="Description of Artificial Sequence: Synthetic oligonucleotide"
tggatcaacaccgacaccggcgagcctacctacgccgacgacttcaagggc

SEQ ID NO: 740 - DNA, 48 bp, Artificial Sequence
  source: /note="Description of Artificial Sequence: Synthetic oligonucleotide"
aacccgccctactactacggaaccaacaacgccgaagccatggactac

SEQ ID NO: 741 - DNA, 48 bp, Artificial Sequence
  source: /note="Description of Artificial Sequence: Synthetic oligonucleotide"
aaccccccttactactacggcaccaacaacgccgaggccatggactat

SEQ ID NO: 742 - DNA, 21 bp, Artificial Sequence
  source: /note="Description of Artificial Sequence: Synthetic oligonucleotide"
ggattcaccctcaccaattac

SEQ ID NO: 743 - DNA, 21 bp, Artificial Sequence
  source: /note="Description of Artificial Sequence: Synthetic oligonucleotide"
ggcttcaccctgaccaactac

SEQ ID NO: 744 - DNA, 18 bp, Artificial Sequence
  source: /note="Description of Artificial Sequence: Synthetic oligonucleotide"
aacaccgacaccggggag

SEQ ID NO: 745 - DNA, 18 bp, Artificial Sequence
  source: /note="Description of Artificial Sequence: Synthetic oligonucleotide"
aacaccgacaccggcgag

SEQ ID NO: 746 - DNA, 33 bp, Artificial Sequence
  source: /note="Description of Artificial Sequence: Synthetic oligonucleotide"
agctctagtcaggatatctctaactacctgaac

SEQ ID NO: 747 - DNA, 33 bp, Artificial Sequence
  source: /note="Description of Artificial Sequence: Synthetic oligonucleotide"
tcctccagccaggacatctccaactacctgaac

SEQ ID NO: 748 - DNA, 21 bp, Artificial Sequence
  source: /note="Description of Artificial Sequence: Synthetic oligonucleotide"
tacactagcaccctgcacctg

SEQ ID NO: 749 - DNA, 21 bp, Artificial Sequence
  source: /note="Description of Artificial Sequence: Synthetic oligonucleotide"
tacacctccaccctgcacctg

SEQ ID NO: 750 - DNA, 27 bp, Artificial Sequence
  source: /note="Description of Artificial Sequence: Synthetic oligonucleotide"
cagcagtactataacctgccctggacc

SEQ ID NO: 751 - DNA, 27 bp, Artificial Sequence
  source: /note="Description of Artificial Sequence: Synthetic oligonucleotide"
cagcagtactacaacctgccctggacc

SEQ ID NO: 752 - DNA, 21 bp, Artificial Sequence
  source: /note="Description of Artificial Sequence: Synthetic oligonucleotide"
agtcaggatatctctaactac

SEQ ID NO: 753 - DNA, 21 bp, Artificial Sequence
  source: /note="Description of Artificial Sequence: Synthetic oligonucleotide"
agccaggacatctccaactac

SEQ ID NO: 754 - DNA, 9 bp, Artificial Sequence
  source: /note="Description of Artificial Sequence: Synthetic oligonucleotide"
tacactagc

SEQ ID NO: 755 - DNA, 9 bp, Artificial Sequence
  source: /note="Description of Artificial Sequence: Synthetic oligonucleotide"
tacacctcc

SEQ ID NO: 756 - DNA, 18 bp, Artificial Sequence
  source: /note="Description of Artificial Sequence: Synthetic oligonucleotide"
tactataacctgccctgg

SEQ ID NO: 757 - DNA, 18 bp, Artificial Sequence
  source: /note="Description of Artificial Sequence: Synthetic oligonucleotide"
tactacaacctgccctgg

SEQ ID NO: 758 - DNA, 15 bp, Artificial Sequence
  source: /note="Description of Artificial Sequence: Synthetic oligonucleotide"
aactacgggatgaac

SEQ ID NO: 759 - DNA, 51 bp, Artificial Sequence
  source: /note="Description of Artificial Sequence: Synthetic oligonucleotide"
tggattaacaccgacaccggcgagcctacctacgccgacgactttaagggc

SEQ ID NO: 760 - DNA, 48 bp, Artificial Sequence
  source: /note="Description of Artificial Sequence: Synthetic oligonucleotide"
aaccccccctactactacggcactaacaacgccgaggctatggactac

SEQ ID NO: 761 - DNA, 21 bp, Artificial Sequence
  source: /note="Description of Artificial Sequence: Synthetic oligonucleotide"
ggcttcaccctgactaactac

SEQ ID NO: 762 - protein, 447 aa, Artificial Sequence
  source: /note="Description of Artificial Sequence: Synthetic polypeptide"
QVQLQQWGAGLLKPSETLSLTCAVYGGSFSDYYWNWIRQPPGKGLEWIGEINHRGSTNSNPSLKSRVTLSLDTSKNQFSLKLRSVTAADTAVYYCAFGYSDYEYNWFDPWGQGTLVTVSSASTKGPSVFPLAPCSRSTSESTAALGCLVKDYFPEPVTVSWNSGALTSGVHTFPAVLQSSGLYSLSSVVTVPSSSLGTKTYTCNVDHKPSNTKVDKRVESKYGPPCPPCPAPEFLGGPSVFLFPPKPKDTLMISRTPEVTCVVVDVSQEDPEVQFNWYVDGVEVHNAKTKPREEQFNSTYRVVSVLTVLHQDWLNGKEYKCKVSNKGLPSSIEKTISKAKGQPREPQVYTLPPSQEEMTKNQVSLTCLVKGFYPSDIAVEWESNGQPENNYKTTPPVLDSDGSFFLYSRLTVDKSRWQEGNVFSCSVMHEALHNHYTQKSLSLSLGK

SEQ ID NO: 763 - protein, 214 aa, Artificial Sequence
  source: /note="Description of Artificial Sequence: Synthetic polypeptide"
EIVLTQSPATLSLSPGERATLSCRASQSISSYLAWYQQKPGQAPRLLIYDASNRATGIPARFSGSGSGTDFTLTISSLEPEDFAVYYCQQRSNWPLTFGQGTNLEIKRTVAAPSVFIFPPSDEQLKSGTASVVCLLNNFYPREAKVQWKVDNALQSGNSQESVTEQDSKDSTYSLSSTLTLSKADYEKHKVYACEVTHQGLSSPVTKSFNRGEC

SEQ ID NO: 764 - protein, 446 aa, Artificial Sequence
  source: /note="Description of Artificial Sequence: Synthetic polypeptide"
QVQLKESGPGLVAPSQSLSITCTVSGFSLTAYGVNWVRQPPGKGLEWLGMIWDDGSTDYNSALKSRLSISKDNSKSQVFLKMNSLQTDDTARYYCAREGDVAFDYWGQGTTLTVSSASTKGPSVFPLAPSSKSTSGGTAALGCLVKDYFPEPVTVSWNSGALTSGVHTFPAVLQSSGLYSLSSVVTVPSSSLGTQTYICNVNHKPSNTKVDKKVEPKSCDKTHTCPPCPAPELLGGPSVFLFPPKPKDTLMISRTPEVTCVVVDVSHEDPEVKFNWYVDGVEVHNAKTKPREEQYNSTYRVVSVLTVLHQDWLNGKEYKCKVSNKALPAPIEKTISKAKGQPREPQVYTLPPSRDELTKNQVSLTCLVKGFYPSDIAVEWESNGQPENNYKTTPPVLDSDGSFFLYSKLTVDKSRWQQGNVFSCSVMHEALHNHYTQKSLSLSPGK

SEQ ID NO: 765 - protein, 220 aa, Artificial Sequence
  source: /note="Description of Artificial Sequence: Synthetic polypeptide"
DIVMTQSPSSLAVSVGQKVTMSCKSSQSLLNGSNQKNYLAWYQQKPGQSPKLLVYFASTRDSGVPDRFIGSGSGTDFTLTISSVQAEDLADYFCLQHFGTPPTFGGGTKLEIKRTVAAPSVFIFPPSDEQLKSGTASVVCLLNNFYPREAKVQWKVDNALQSGNSQESVTEQDSKDSTYSLSSTLTLSKADYEKHKVYACEVTHQGLSSPVTKSFNRGEC

SEQ ID NO: 766 - protein, 10 aa, Artificial Sequence
  source: /note="Description of Artificial Sequence: Synthetic peptide"
GFTLTNYGMN

SEQ ID NO: 767-800 - skipped (34 entries)

SEQ ID NO: 801 - protein, 5 aa, Artificial Sequence
  source: /note="Description of Artificial Sequence: Synthetic peptide"
SYNMH

SEQ ID NO: 802 - protein, 17 aa, Artificial Sequence
  source: /note="Description of Artificial Sequence: Synthetic peptide"
DIYPGNGDTSYNQKFKG

SEQ ID NO: 803 - protein, 9 aa, Artificial Sequence
  source: /note="Description of Artificial Sequence: Synthetic peptide"
VGGAFPMDY

SEQ ID NO: 804 - protein, 7 aa, Artificial Sequence
  source: /note="Description of Artificial Sequence: Synthetic peptide"
GYTFTSY

SEQ ID NO: 805 - protein, 6 aa, Artificial Sequence
  source: /note="Description of Artificial Sequence: Synthetic peptide"
YPGNGD

SEQ ID NO: 806 - protein, 118 aa, Artificial Sequence
  source: /note="Description of Artificial Sequence: Synthetic polypeptide"
QVQLVQSGAEVKKPGSSVKVSCKASGYTFTSYNMHWVRQAPGQGLEWMGDIYPGNGDTSYNQKFKGRVTITADKSTSTVYMELSSLRSEDTAVYYCARVGGAFPMDYWGQGTTVTVSS

SEQ ID NO: 807 - DNA, 354 bp, Artificial Sequence
  source: /note="Description of Artificial Sequence: Synthetic polynucleotide"
caggtgcagctggtgcagtcaggcgccgaagtgaagaaacccggctctagcgtgaaagtttcttgtaaagctagtggctacaccttcactagctataatatgcactgggttcgccaggccccagggcaaggcctcgagtggatgggcgatatctaccccgggaacggcgacactagttataatcagaagtttaagggtagagtcactatcaccgccgataagtctactagcaccgtctatatggaactgagttccctgaggtctgaggacaccgccgtctactactgcgctagagtgggcggagccttccctatggactactggggtcaaggcactaccgtgaccgtgtctagc

SEQ ID NO: 808 - protein, 444 aa, Artificial Sequence
  source: /note="Description of Artificial Sequence: Synthetic polypeptide"
QVQLVQSGAEVKKPGSSVKVSCKASGYTFTSYNMHWVRQAPGQGLEWMGDIYPGNGDTSYNQKFKGRVTITADKSTSTVYMELSSLRSEDTAVYYCARVGGAFPMDYWGQGTTVTVSSASTKGPSVFPLAPCSRSTSESTAALGCLVKDYFPEPVTVSWNSGALTSGVHTFPAVLQSSGLYSLSSVVTVPSSSLGTKTYTCNVDHKPSNTKVDKRVESKYGPPCPPCPAPEFLGGPSVFLFPPKPKDTLMISRTPEVTCVVVDVSQEDPEVQFNWYVDGVEVHNAKTKPREEQFNSTYRVVSVLTVLHQDWLNGKEYKCKVSNKGLPSSIEKTISKAKGQPREPQVYTLPPSQEEMTKNQVSLTCLVKGFYPSDIAVEWESNGQPENNYKTTPPVLDSDGSFFLYSRLTVDKSRWQEGNVFSCSVMHEALHNHYTQKSLSLSLG

SEQ ID NO: 809 - DNA, 1332 bp, Artificial Sequence
  source: /note="Description of Artificial Sequence: Synthetic polynucleotide"
caggtgcagctggtgcagtcaggcgccgaagtgaagaaacccggctctagcgtgaaagtttcttgtaaagctagtggctacaccttcactagctataatatgcactgggttcgccaggccccagggcaaggcctcgagtggatgggcgatatctaccccgggaacggcgacactagttataatcagaagtttaagggtagagtcactatcaccgccgataagtctactagcaccgtctatatggaactgagttccctgaggtctgaggacaccgccgtctactactgcgctagagtgggcggagccttccctatggactactggggtcaaggcactaccgtgaccgtgtctagcgctagcactaagggcccgtccgtgttccccctggcaccttgtagccggagcactagcgaatccaccgctgccctcggctgcctggtcaaggattacttcccggagcccgtgaccgtgtcctggaacagcggagccctgacctccggagtgcacaccttccccgctgtgctgcagagctccgggctgtactcgctgtcgtcggtggtcacggtgccttcatctagcctgggtaccaagacctacacttgcaacgtggaccacaagccttccaacactaaggtggacaagcgcgtcgaatcgaagtacggcccaccgtgcccgccttgtcccgcgccggagttcctcggcggtccctcggtctttctgttcccaccgaagcccaaggacactttgatgatttcccgcacccctgaagtgacatgcgtggtcgtggacgtgtcacaggaagatccggaggtgcagttcaattggtacgtggatggcgtcgaggtgcacaacgccaaaaccaagccgagggaggagcagttcaactccacttaccgcgtcgtgtccgtgctgacggtgctgcatcaggactggctgaacgggaaggagtacaagtgcaaagtgtccaacaagggacttcctagctcaatcgaaaagaccatctcgaaagccaagggacagccccgggaaccccaagtgtataccctgccaccgagccaggaagaaatgactaagaaccaagtctcattgacttgccttgtgaagggcttctacccatcggatatcgccgtggaatgggagtccaacggccagccggaaaacaactacaagaccacccctccggtgctggactcagacggatccttcttcctctactcgcggctgaccgtggataagagcagatggcaggagggaaatgtgttcagctgttctgtgatgcatgaagccctgcacaaccactacactcagaagtccctgtccctctccctggga

SEQ ID NO: 810 - protein, 15 aa, Artificial Sequence
  source: /note="Description of Artificial Sequence: Synthetic peptide"
RASESVEYYGTSLMQ

SEQ ID NO: 811 - protein, 7 aa, Artificial Sequence
  source: /note="Description of Artificial Sequence: Synthetic peptide"
AASNVES

SEQ ID NO: 812 - protein, 9 aa, Artificial Sequence
  source: /note="Description of Artificial Sequence: Synthetic peptide"
QQSRKDPST

SEQ ID NO: 813 - protein, 11 aa, Artificial Sequence
  source: /note="Description of Artificial Sequence: Synthetic peptide"
SESVEYYGTSL

SEQ ID NO: 814 - protein, 3 aa, Artificial Sequence
  source: /note="Description of Artificial Sequence: Synthetic peptide"
AAS

SEQ ID NO: 815 - protein, 6 aa, Artificial Sequence
  source: /note="Description of Artificial Sequence: Synthetic peptide"
SRKDPS

SEQ ID NO: 816 - protein, 111 aa, Artificial Sequence
  source: /note="Description of Artificial Sequence: Synthetic polypeptide"
AIQLTQSPSSLSASVGDRVTITCRASESVEYYGTSLMQWYQQKPGKAPKLLIYAASNVESGVPSRFSGSGSGTDFTLTISSLQPEDFATYFCQQSRKDPSTFGGGTKVEIK

SEQ ID NO: 817 - DNA, 333 bp, Artificial Sequence
  source: /note="Description of Artificial Sequence: Synthetic polynucleotide"
gctattcagctgactcagtcacctagtagcctgagcgctagtgtgggcgatagagtgactatcacctgtagagctagtgaatcagtcgagtactacggcactagcctgatgcagtggtatcagcagaagcccgggaaagcccctaagctgctgatctacgccgcctctaacgtggaatcaggcgtgccctctaggtttagcggtagcggtagtggcaccgacttcaccctgactatctctagcctgcagcccgaggacttcgctacctacttctgtcagcagtctaggaaggaccctagcaccttcggcggaggcactaaggtcgagattaag

SEQ ID NO: 818 - protein, 218 aa, Artificial Sequence
  source: /note="Description of Artificial Sequence: Synthetic polypeptide"
AIQLTQSPSSLSASVGDRVTITCRASESVEYYGTSLMQWYQQKPGKAPKLLIYAASNVESGVPSRFSGSGSGTDFTLTISSLQPEDFATYFCQQSRKDPSTFGGGTKVEIKRTVAAPSVFIFPPSDEQLKSGTASVVCLLNNFYPREAKVQWKVDNALQSGNSQESVTEQDSKDSTYSLSSTLTLSKADYEKHKVYACEVTHQGLSSPVTKSFNRGEC

SEQ ID NO: 819 - DNA, 654 bp, Artificial Sequence
  source: /note="Description of Artificial Sequence: Synthetic polynucleotide"
gctattcagctgactcagtcacctagtagcctgagcgctagtgtgggcgatagagtgactatcacctgtagagctagtgaatcagtcgagtactacggcactagcctgatgcagtggtatcagcagaagcccgggaaagcccctaagctgctgatctacgccgcctctaacgtggaatcaggcgtgccctctaggtttagcggtagcggtagtggcaccgacttcaccctgactatctctagcctgcagcccgaggacttcgctacctacttctgtcagcagtctaggaaggaccctagcaccttcggcggaggcactaaggtcgagattaagcgtacggtggccgctcccagcgtgttcatcttcccccccagcgacgagcagctgaagagcggcaccgccagcgtggtgtgcctgctgaacaacttctacccccgggaggccaaggtgcagtggaaggtggacaacgccctgcagagcggcaacagccaggagagcgtcaccgagcaggacagcaaggactccacctacagcctgagcagcaccctgaccctgagcaaggccgactacgagaagcataaggtgtacgcctgcgaggtgacccaccagggcctgtccagccccgtgaccaagagcttcaacaggggcgagtgc

SEQ ID NO: 820 - protein, 17 aa, Artificial Sequence
  source: /note="Description of Artificial Sequence: Synthetic peptide"
DIYPGQGDTSYNQKFKG

SEQ ID NO: 821 - protein, 6 aa, Artificial Sequence
  source: /note="Description of Artificial Sequence: Synthetic peptide"
YPGQGD

SEQ ID NO: 822 - protein, 118 aa, Artificial Sequence
  source: /note="Description of Artificial Sequence: Synthetic polypeptide"
QVQLVQSGAEVKKPGASVKVSCKASGYTFTSYNMHWVRQAPGQGLEWIGDIYPGQGDTSYNQKFKGRATMTADKSTSTVYMELSSLRSEDTAVYYCARVGGAFPMDYWGQGTLVTVSS

SEQ ID NO: 823 - DNA, 354 bp, Artificial Sequence
  source: /note="Description of Artificial Sequence: Synthetic polynucleotide"
caggtgcagctggtgcagtcaggcgccgaagtgaagaaacccggcgctagtgtgaaagttagctgtaaagctagtggctatactttcacttcttataatatgcactgggtccgccaggccccaggtcaaggcctcgagtggatcggcgatatctaccccggtcaaggcgacacttcctataatcagaagtttaagggtagagctactatgaccgccgataagtctacttctaccgtctatatggaactgagttccctgaggtctgaggacaccgccgtctactactgcgctagagtgggcggagccttcccaatggactactggggtcaaggcaccctggtcaccgtgtctagc

SEQ ID NO: 824 - protein, 444 aa, Artificial Sequence
  source: /note="Description of Artificial Sequence: Synthetic polypeptide"
QVQLVQSGAEVKKPGASVKVSCKASGYTFTSYNMHWVRQAPGQGLEWIGDIYPGQGDTSYNQKFKGRATMTADKSTSTVYMELSSLRSEDTAVYYCARVGGAFPMDYWGQGTLVTVSSASTKGPSVFPLAPCSRSTSESTAALGCLVKDYFPEPVTVSWNSGALTSGVHTFPAVLQSSGLYSLSSVVTVPSSSLGTKTYTCNVDHKPSNTKVDKRVESKYGPPCPPCPAPEFLGGPSVFLFPPKPKDTLMISRTPEVTCVVVDVSQEDPEVQFNWYVDGVEVHNAKTKPREEQFNSTYRVVSVLTVLHQDWLNGKEYKCKVSNKGLPSSIEKTISKAKGQPREPQVYTLPPSQEEMTKNQVSLTCLVKGFYPSDIAVEWESNGQPENNYKTTPPVLDSDGSFFLYSRLTVDKSRWQEGNVFSCSVMHEALHNHYTQKSLSLSLG

SEQ ID NO: 825 - DNA, 1332 bp, Artificial Sequence
  source: /note="Description of Artificial Sequence: Synthetic polynucleotide"
caggtgcagctggtgcagtcaggcgccgaagtgaagaaacccggcgctagtgtgaaagttagctgtaaagctagtggctatactttcacttcttataatatgcactgggtccgccaggccccaggtcaaggcctcgagtggatcggcgatatctaccccggtcaaggcgacacttcctataatcagaagtttaagggtagagctactatgaccgccgataagtctacttctaccgtctatatggaactgagttccctgaggtctgaggacaccgccgtctactactgcgctagagtgggcggagccttcccaatggactactggggtcaaggcaccctggtcaccgtgtctagcgctagcactaagggcccgtccgtgttccccctggcaccttgtagccggagcactagcgaatccaccgctgccctcggctgcctggtcaaggattacttcccggagcccgtgaccgtgtcctggaacagcggagccctgacctccggagtgcacaccttccccgctgtgctgcagagctccgggctgtactcgctgtcgtcggtggtcacggtgccttcatctagcctgggtaccaagacctacacttgcaacgtggaccacaagccttccaacactaaggtggacaagcgcgtcgaatcgaagtacggcccaccgtgcccgccttgtcccgcgccggagttcctcggcggtccctcggtctttctgttcccaccgaagcccaaggacactttgatgatttcccgcacccctgaagtgacatgcgtggtcgtggacgtgtcacaggaagatccggaggtgcagttcaattggtacgtggatggcgtcgaggtgcacaacgccaaaaccaagccgagggaggagcagttcaactccacttaccgcgtcgtgtccgtgctgacggtgctgcatcaggactggctgaacgggaaggagtacaagtgcaaagtgtccaacaagggacttcctagctcaatcgaaaagaccatctcgaaagccaagggacagccccgggaaccccaagtgtataccctgccaccgagccaggaagaaatgactaagaaccaagtctcattgacttgccttgtgaagggcttctacccatcggatatcgccgtggaatgggagtccaacggccagccggaaaacaactacaagaccacccctccggtgctggactcagacggatccttcttcctctactcgcggctgaccgtggataagagcagatggcaggagggaaatgtgttcagctgttctgtgatgcatgaagccctgcacaaccactacactcagaagtccctgtccctctccctggga

SEQ ID NO: 826 - protein, 111 aa, Artificial Sequence
  source: /note="Description of Artificial Sequence: Synthetic polypeptide"
DIVLTQSPDSLAVSLGERATINCRASESVEYYGTSLMQWYQQKPGQPPKLLIYAASNVESGVPDRFSGSGSGTDFTLTISSLQAEDVAVYYCQQSRKDPSTFGGGTKVEIK

SEQ ID NO: 827 - DNA, 333 bp, Artificial Sequence
  source: /note="Description of Artificial Sequence: Synthetic polynucleotide"
gatatcgtcctgactcagtcacccgatagcctggccgtcagcctgggcgagcgggctactattaactgtagagctagtgaatcagtcgagtactacggcactagcctgatgcagtggtatcagcagaagcccggtcaaccccctaagctgctgatctacgccgcctctaacgtggaatcaggcgtgcccgataggtttagcggtagcggtagtggcaccgacttcaccctgactattagtagcctgcaggccgaggacgtggccgtctactactgtcagcagtctaggaaggaccctagcaccttcggcggaggcactaaggtcgagattaag

SEQ ID NO: 828 - protein, 218 aa, Artificial Sequence
  source: /note="Description of Artificial Sequence: Synthetic polypeptide"
DIVLTQSPDSLAVSLGERATINCRASESVEYYGTSLMQWYQQKPGQPPKLLIYAASNVESGVPDRFSGSGSGTDFTLTISSLQAEDVAVYYCQQSRKDPSTFGGGTKVEIKRTVAAPSVFIFPPSDEQLKSGTASVVCLLNNFYPREAKVQWKVDNALQSGNSQESVTEQDSKDSTYSLSSTLTLSKADYEKHKVYACEVTHQGLSSPVTKSFNRGEC

SEQ ID NO: 829 - DNA, 654 bp, Artificial Sequence
  source: /note="Description of Artificial Sequence: Synthetic polynucleotide"
gatatcgtcctgactcagtcacccgatagcctggccgtcagcctgggcgagcgggctactattaactgtagagctagtgaatcagtcgagtactacggcactagcctgatgcagtggtatcagcagaagcccggtcaaccccctaagctgctgatctacgccgcctctaacgtggaatcaggcgtgcccgataggtttagcggtagcggtagtggcaccgacttcaccctgactattagtagcctgcaggccgaggacgtggccgtctactactgtcagcagtctaggaaggaccctagcaccttcggcggaggcactaaggtcgagattaagcgtacggtggccgctcccagcgtgttcatcttcccccccagcgacgagcagctgaagagcggcaccgccagcgtggtgtgcctgctgaacaacttctacccccgggaggccaaggtgcagtggaaggtggacaacgccctgcagagcggcaacagccaggagagcgtcaccgagcaggacagcaaggactccacctacagcctgagcagcaccctgaccctgagcaaggccgactacgagaagcataaggtgtacgcctgcgaggtgacccaccagggcctgtccagccccgtgaccaagagcttcaacaggggcgagtgc

SEQ ID NO: 830 - protein, 114 aa, Artificial Sequence
  source: /note="Description of Artificial Sequence: Synthetic polypeptide"
EVQLLESGGGLVQPGGSLRLSCAAASGFTFSSYDMSWVRQAPGKGLDWVSTISGGGTYTYYQDSVKGRFTISRDNSKNTLYLQMNSLRAEDTAVYYCASMDYWGQGTTVTVSSA

SEQ ID NO: 831 - protein, 108 aa, Artificial Sequence
  source: /note="Description of Artificial Sequence: Synthetic polypeptide"
DIQMTQSPSSLSASVGDRVTITCRASQSIRRYLNWYHQKPGKAPKLLIYGASTLQSGVPSRFSGSGSGTDFTLTISSLQPEDFAVYYCQQSHSAPLTFGGGTKVEIKR

SEQ ID NO: 832 - protein, 120 aa, Artificial Sequence
  source: /note="Description of Artificial Sequence: Synthetic polypeptide"
EVQVLESGGGLVQPGGSLRLYCVASGFTFSGSYAMSWVRQAPGKGLEWVSAISGSGGSTYYADSVKGRFTISRDNSKNTLYLQMNSLRAEDTAVYYCAKKYYVGPADYWGQGTLVTVSSG

SEQ ID NO: 833 - protein, 113 aa, Artificial Sequence
  source: /note="Description of Artificial Sequence: Synthetic polypeptide"
DIVMTQSPDSLAVSLGERATINCKSSQSVLYSSNNKNYLAWYQHKPGQPPKLLIYWASTRESGVPDRFSGSGSGTDFTLTISSLQAEDVAVYYCQQYYSSPLTFGGGTKIEVK

SEQ ID NO: 834-1000 - skipped (167 entries)

SEQ ID NO: 1001 - protein, 114 aa, Homo sapiens
NWVNVISDLKKIEDLIQSMHIDATLYTESDVHPSCKVTAMKCFLLELQVISLESGDASIHDTVENLIILANNSLSSNGNVTESGCKECEELEEKNIKEFLQSFVHIVQMFINTS

SEQ ID NO: 1002 - protein, 170 aa, Homo sapiens
ITCPPPMSVEHADIWVKSYSLYSRERYICNSGFKRKAGTSSLTECVLNKATNVAHWTTPSLKCIRDPALVHQRPAPPSTVTTAGVTPQPESLSPSGKEPAASSPSSNNTAATTAAIVPGSQLMPSKSPSTGTTEISSHESSHGTPSQTTAKNWELTASASHQPPGVYPQG

SEQ ID NO: 1003 - protein, 114 aa, Artificial Sequence
  source: /note="Description of Artificial Sequence: Synthetic polypeptide"
NWVNVISDLKKIEDLIQSMHIDATLYTESDVHPSCKVTAMKCFLLELQVISLESGDASIHDTVENLIILANDSLSSNGNVTESGCKECEELEEKNIKEFLQSFVHIVQMFINTS

SEQ ID NO: 1004 - protein, 297 aa, Artificial Sequence
  source: /note="Description of Artificial Sequence: Synthetic polypeptide"
ITCPPPMSVEHADIWVKSYSLYSRERYICNSGFKRKAGTSSLTECVLNKATNVAHWTTPSLKCIREPKSCDKTHTCPPCPAPELLGGPSVFLFPPKPKDTLMISRTPEVTCVVVDVSHEDPEVKFNWYVDGVEVHNAKTKPREEQYNSTYRVVSVLTVLHQDWLNGKEYKCKVSNKALPAPIEKTISKAKGQPREPQVYTLPPSRDELTKNQVSLTCLVKGFYPSDIAVEWESNGQPENNYKTTPPVLDSDGSFFLYSKLTVDKSRWQQGNVFSCSVMHEALHNHYTQKSLSLSPGK

SEQ ID NO: 1005 - protein, 114 aa, Homo sapiens; identical to SEQ ID NO: 1001
  VARIANT (93)..(93): /replace="Lys"
  SITE (1)..(114): /note="Variant residues given in the sequence have no preference with respect to those in the annotations for variant positions"

SEQ ID NO: 1006 - protein, 77 aa, Homo sapiens
ITCPPPMSVEHADIWVKSYSLYSRERYICNSGFKRKAGTSSLTECVLNKATNVAHWTTPSLKCIRDPALVHQRPAPP

SEQ ID NO: 1007 - DNA, 1184 bp, Artificial Sequence
  source: /note="Description of Artificial Sequence: Synthetic polynucleotide"
cgtgaggctccggtgcccgtcagtgggcagagcgcacatcgcccacagtccccgagaagttggggggaggggtcggcaattgaaccggtgcctagagaaggtggcgcggggtaaactgggaaagtgatgtcgtgtactggctccgcctttttcccgagggtgggggagaaccgtatataagtgcagtagtcgccgtgaacgttctttttcgcaacgggtttgccgccagaacacaggtaagtgccgtgtgtggttcccgcgggcctggcctctttacgggttatggcccttgcgtgccttgaattacttccacctggctgcagtacgtgattcttgatcccgagcttcgggttggaagtgggtgggagagttcgaggccttgcgcttaaggagccccttcgcctcgtgcttgagttgaggcctggcctgggcgctggggccgccgcgtgcgaatctggtggcaccttcgcgcctgtctcgctgctttcgataagtctctagccatttaaaatttttgatgacctgctgcgacgctttttttctggcaagatagtcttgtaaatgcgggccaagatctgcacactggtatttcggtttttggggccgcgggcggcgacggggcccgtgcgtcccagcgcacatgttcggcgaggcggggcctgcgagcgcggccaccgagaatcggacgggggtagtctcaagctggccggcctgctctggtgcctggcctcgcgccgccgtgtatcgccccgccctgggcggcaaggctggcccggtcggcaccagttgcgtgagcggaaagatggccgcttcccggccctgctgcagggagctcaaaatggaggacgcggcgctcgggagagcgggcgggtgagtcacccacacaaaggaaaagggcctttccgtcctcagccgtcgcttcatgtgactccacggagtaccgggcgccgtccaggcacctcgattagttctcgagcttttggagtacgtcgtctttaggttggggggaggggttttatgcgatggagtttccccacactgagtgggtggagactgaagttaggccagcttggcacttgatgtaattctccttggaatttgccctttttgagtttggatcttggttcattctcaagcctcagacagtggttcaaagtttttttcttccatttcaggtgtcgtga

SEQ ID NO: 1008 - protein, 21 aa, Artificial Sequence
  source: /note="Description of Artificial Sequence: Synthetic peptide"
MALPVTALLLPLALLLHAARP

SEQ ID NO: 1009 - DNA, 63 bp, Artificial Sequence
  source: /note="Description of Artificial Sequence: Synthetic oligonucleotide"
atggccctgcctgtgacagccctgctgctgcctctggctctgctgctgcatgccgctagaccc

SEQ ID NO: 1010 - DNA, 63 bp, Artificial Sequence
  source: /note="Description of Artificial Sequence: Synthetic oligonucleotide"
atggccctccctgtcaccgccctgctgcttccgctggctcttctgctccacgccgctcggccc

SEQ ID NO: 1011 - protein, 45 aa, Artificial Sequence
  source: /note="Description of Artificial Sequence: Synthetic polypeptide"
TTTPAPRPPTPAPTIASQPLSLRPEACRPAAGGAVHTRGLDFACD

SEQ ID NO: 1012 - DNA, 135 bp, Artificial Sequence
  source: /note="Description of Artificial Sequence: Synthetic polynucleotide"
accacgacgccagcgccgcgaccaccaacaccggcgcccaccatcgcgtcgcagcccctgtccctgcgcccagaggcgtgccggccagcggcggggggcgcagtgcacacgagggggctggacttcgcctgtgat

SEQ ID NO: 1013 - protein, 230 aa, Artificial Sequence
  source: /note="Description of Artificial Sequence: Synthetic polypeptide"
ESKYGPPCPPCPAPEFLGGPSVFLFPPKPKDTLMISRTPEVTCVVVDVSQEDPEVQFNWYVDGVEVHNAKTKPREEQFNSTYRVVSVLTVLHQDWLNGKEYKCKVSNKGLPSSIEKTISKAKGQPREPQVYTLPPSQEEMTKNQVSLTCLVKGFYPSDIAVEWESNGQPENNYKTTPPVLDSDGSFFLYSRLTVDKSRWQEGNVFSCSVMHEALHNHYTQKSLSLSLGKM

SEQ ID NO: 1014 - DNA, 690 bp, Artificial Sequence
  source: /note="Description of Artificial Sequence: Synthetic polynucleotide"
gagagcaagtacggccctccctgccccccttgccctgcccccgagttcctgggcggacccagcgtgttcctgttcccccccaagcccaaggacaccctgatgatcagccggacccccgaggtgacctgtgtggtggtggacgtgtcccaggaggaccccgaggtccagttcaactggtacgtggacggcgtggaggtgcacaacgccaagaccaagccccgggaggagcagttcaatagcacctaccgggtggtgtccgtgctgaccgtgctgcaccaggactggctgaacggcaaggaatacaagtgtaaggtgtccaacaagggcctgcccagcagcatcgagaaaaccatcagcaaggccaagggccagcctcgggagccccaggtgtacaccctgccccctagccaagaggagatgaccaagaaccaggtgtccctgacctgcctggtgaagggcttctaccccagcgacatcgccgtggagtgggagagcaacggccagcccgagaacaactacaagaccaccccccctgtgctggacagcgacggcagcttcttcctgtacagccggctgaccgtggacaagagccggtggcaggagggcaacgtctttagctgctccgtgatgcacgaggccctgcacaaccactacacccagaagagcctgagcctgtccctgggcaagatg

SEQ ID NO: 1015 - protein, 282 aa, Artificial Sequence
  source: /note="Description of Artificial Sequence: Synthetic polypeptide"
RWPESPKAQASSVPTAQPQAEGSLAKATTAPATTRNTGRGGEEKKKEKEKEEQEERETKTPECPSHTQPLGVYLLTPAVQDLWLRDKATFTCFVVGSDLKDAHLTWEVAGKVPTGGVEEGLLERHSNGSQSQHSRLTLPRSLWNAGTSVTCTLNHPSLPPQRLMALREPAAQAPVKLSLNLLASSDPPEAASWLLCEVSGFSPPNILLMWLEDQREVNTSGFAPARPPPQPGSTTFWAWSVLRVPAPPSPQPATYTCVVSHEDSRTLLNASRSLEVSYVTDH

SEQ ID NO: 1016 - DNA, 847 bp, Artificial Sequence
  source: /note="Description of Artificial Sequence: Synthetic polynucleotide"
aggtggcccgaaagtcccaaggcccaggcatctagtgttcctactgcacagccccaggcagaaggcagcctagccaaagctactactgcacctgccactacgcgcaatactggccgtggcggggaggagaagaaaaaggagaaagagaaagaagaacaggaagagagggagaccaagacccctgaatgtccatcccatacccagccgctgggcgtctatctcttgactcccgcagtacaggacttgtggcttagagataaggccacctttacatgtttcgtcgtgggctctgacctgaaggatgcccatttgacttgggaggttgccggaaaggtacccacagggggggttgaggaagggttgctggagcgccattccaatggctctcagagccagcactcaagactcacccttccgagatccctgtggaacgccgggacctctgtcacatgtactctaaatcatcctagcctgcccccacagcgtctgatggcccttagagagccagccgcccaggcaccagttaagcttagcctgaatctgctcgccagtagtgatcccccagaggccgccagctggctcttatgcgaagtgtccggctttagcccgcccaacatcttgctcatgtggctggaggaccagcgagaagtgaacaccagcggcttcgctccagcccggcccccaccccagccgggttctaccacattctgggcctggagtgtcttaagggtcccagcaccacctagcccccagccagccacatacacctgtgttgtgtcccatgaagatagcaggaccctgctaaatgcttctaggagtctggaggtttcctacgtgactgaccatt

SEQ ID NO: 1017 - protein, 10 aa, Artificial Sequence
  source: /note="Description of Artificial Sequence: Synthetic peptide"
GGGGSGGGGS

SEQ ID NO: 1018 - DNA, 30 bp, Artificial Sequence
  source: /note="Description of Artificial Sequence: Synthetic oligonucleotide"
ggtggcggaggttctggaggtggaggttcc

SEQ ID NO: 1019 - protein, 24 aa, Artificial Sequence
  source: /note="Description of Artificial Sequence: Synthetic peptide"
IYIWAPLAGTCGVLLLSLVITLYC

SEQ ID NO: 1020 - DNA, 72 bp, Artificial Sequence
  source: /note="Description of Artificial Sequence: Synthetic oligonucleotide"
atctacatctgggcgcccttggccgggacttgtggggtccttctcctgtcactggttatcaccctttactgc

SEQ ID NO: 1021 - DNA, 72 bp, Artificial Sequence
  source: /note="Description of Artificial Sequence: Synthetic oligonucleotide"
atctacatttgggcccctctggctggtacttgcggggtcctgctgctttcactcgtgatcactctttactgt

SEQ ID NO: 1022 - protein, 42 aa, Artificial Sequence
  source: /note="Description of Artificial Sequence: Synthetic polypeptide"
KRGRKKLLYIFKQPFMRPVQTTQEEDGCSCRFPEEEEGGCEL

SEQ ID NO: 1023 - DNA, 126 bp, Artificial Sequence
  source: /note="Description of Artificial Sequence: Synthetic polynucleotide"
aaacggggcagaaagaaactcctgtatatattcaaacaaccatttatgagaccagtacaaactactcaagaggaagatggctgtagctgccgatttccagaagaagaagaaggaggatgtgaactg

SEQ ID NO: 1024 - DNA, 126 bp, Artificial Sequence
  source: /note="Description of Artificial Sequence: Synthetic polynucleotide"
aagcgcggtcggaagaagctgctgtacatctttaagcaacccttcatgaggcctgtgcagactactcaagaggaggacggctgttcatgccggttcccagaggaggaggaaggcggctgcgaactg

SEQ ID NO: 1025 - protein, 48 aa, Artificial Sequence
  source: /note="Description of Artificial Sequence: Synthetic polypeptide"
QRRKYRSNKGESPVEPAEPCRYSCPREEEGSTIPIQEDYRKPEPACSP

SEQ ID NO: 1026 - DNA, 123 bp, Artificial Sequence
  source: /note="Description of Artificial Sequence: Synthetic polynucleotide"
aggagtaagaggagcaggctcctgcacagtgactacatgaacatgactccccgccgccccgggcccacccgcaagcattaccagccctatgccccaccacgcgacttcgcagcctatcgctcc

SEQ ID NO: 1027 - protein, 112 aa, Artificial Sequence
  source: /note="Description of Artificial Sequence: Synthetic polypeptide"
RVKFSRSADAPAYKQGQNQLYNELNLGRREEYDVLDKRRGRDPEMGGKPRRKNPQEGLYNELQKDKMAEAYSEIGMKGERRRGKGHDGLYQGLSTATKDTYDALHMQALPPR

SEQ ID NO: 1028 - DNA, 336 bp, Artificial Sequence
  source: /note="Description of Artificial Sequence: Synthetic polynucleotide"
agagtgaagttcagcaggagcgcagacgcccccgcgtacaagcagggccagaaccagctctataacgagctcaatctaggacgaagagaggagtacgatgttttggacaagagacgtggccgggaccctgagatggggggaaagccgagaaggaagaaccctcaggaaggcctgtacaatgaactgcagaaagataagatggcggaggcctacagtgagattgggatgaaaggcgagcgccggaggggcaaggggcacgatggcctttaccagggtctcagtacagccaccaaggacacctacgacgcccttcacatgcaggccctgccccctcgc

SEQ ID NO: 1029 - DNA, 336 bp, Artificial Sequence
  source: /note="Description of Artificial Sequence: Synthetic polynucleotide"
cgcgtgaaattcagccgcagcgcagatgctccagcctacaagcaggggcagaaccagctctacaacgaactcaatcttggtcggagagaggagtacgacgtgctggacaagcggagaggacgggacccagaaatgggcgggaagccgcgcagaaagaatccccaagagggcctgtacaacgagctccaaaaggataagatggcagaagcctatagcgagattggtatgaaaggggaacgcagaagaggcaaaggccacgacggactgtaccagggactcagcaccgccaccaaggacacctatgacgctcttcacatgcaggccctgccgcctcgg

SEQ ID NO: 1030 - protein, 112 aa, Artificial Sequence
  source: /note="Description of Artificial Sequence: Synthetic polypeptide"
RVKFSRSADAPAYQQGQNQLYNELNLGRREEYDVLDKRRGRDPEMGGKPRRKNPQEGLYNELQKDKMAEAYSEIGMKGERRRGKGHDGLYQGLSTATKDTYDALHMQALPPR

SEQ ID NO: 1031 - DNA, 336 bp, Artificial Sequence
  source: /note="Description of Artificial Sequence: Synthetic polynucleotide"
agagtgaagttcagcaggagcgcagacgcccccgcgtaccagcagggccagaaccagctctataacgagctcaatctaggacgaagagaggagtacgatgttttggacaagagacgtggccgggaccctgagatggggggaaagccgagaaggaagaaccctcaggaaggcctgtacaatgaactgcagaaagataagatggcggaggcctacagtgagattgggatgaaaggcgagcgccggaggggcaaggggcacgatggcctttaccagggtctcagtacagccaccaaggacacctacgacgcccttcacatgcaggccctgccccctcgc

SEQ ID NO: 1032 - protein, 5 aa, Artificial Sequence
  source: /note="Description of Artificial Sequence: Synthetic peptide"
GGGGS

SEQ ID NO: 1033 - DNA, 30 bp, Artificial Sequence; identical to SEQ ID NO: 1018
  source: /note="Description of Artificial Sequence: Synthetic oligonucleotide"

SEQ ID NO: 1034 - protein, 150 aa, Artificial Sequence [sequence omitted]

SEQ ID NO: 1035 - DNA, 450 bp, Artificial Sequence
  source: /note="Description of Artificial Sequence: Synthetic polynucleotide"
cccggatggtttctggactctccggatcgcccgtggaatcccccaaccttctcaccggcactcttggttgtgactgagggcgataatgcgaccttcacgtgctcgttctccaacacctccgaatcattcgtgctgaactggtaccgcatgagcccgtcaaaccagaccgacaagctcgccgcgtttccggaagatcggtcgcaaccgggacaggattgtcggttccgcgtgactcaactgccgaatggcagagacttccacatgagcgtggtccgcgctaggcgaaacgactccgggacctacctgtgcggagccatctcgctggcgcctaaggcccaaatcaaagagagcttgagggccgaactgagagtgaccgagcgcagagctgaggtgccaactgcacatccatccccatcgcctcggcctgcggggcagtttcagaccctggtc

SEQ ID NO: 1036 - protein, 394 aa, Artificial Sequence
  source: /note="Description of Artificial Sequence: Synthetic polypeptide"
MALPVTALLLPLALLLHAARPPGWFLDSPDRPWNPPTFSPALLVVTEGDNATFTCSFSNTSESFVLNWYRMSPSNQTDKLAAFPEDRSQPGQDCRFRVTQLPNGRDFHMSVVRARRNDSGTYLCGAISLAPKAQIKESLRAELRVTERRAEVPTAHPSPSPRPAGQFQTLVTTTPAPRPPTPAPTIASQPLSLRPEACRPAAGGAVHTRGLDFACDIYIWAPLAGTCGVLLLSLVITLYCKRGRKKLLYIFKQPFMRPVQTTQEEDGCSCRFPEEEEGGCELRVKFSRSADAPAYKQGQNQLYNELNLGRREEYDVLDKRRGRDPEMGGKPRRKNPQEGLYNELQKDKMAEAYSEIGMKGERRRGKGHDGLYQGLSTATKDTYDALHMQALPPR

SEQ ID NO: 1037 - DNA, 1182 bp, Artificial Sequence
  source: /note="Description of Artificial Sequence: Synthetic polynucleotide"
atggccctccctgtcactgccctgcttctccccctcgcactcctgctccacgccgctagaccacccggatggtttctggactctccggatcgcccgtggaatcccccaaccttctcaccggcactcttggttgtgactgagggcgataatgcgaccttcacgtgctcgttctccaacacctccgaatcattcgtgctgaactggtaccgcatgagcccgtcaaaccagaccgacaagctcgccgcgtttccggaagatcggtcgcaaccgggacaggattgtcggttccgcgtgactcaactgccgaatggcagagacttccacatgagcgtggtccgcgctaggcgaaacgactccgggacctacctgtgcggagccatctcgctggcgcctaaggcccaaatcaaagagagcttgagggccgaactgagagtgaccgagcgcagagctgaggtgccaactgcacatccatccccatcgcctcggcctgcggggcagtttcagaccctggtcacgaccactccggcgccgcgcccaccgactccggccccaactatcgcgagccagcccctgtcgctgaggccggaagcatgccgccctgccgccggaggtgctgtgcatacccggggattggacttcgcatgcgacatctacatttgggctcctctcgccggaacttgtggcgtgctccttctgtccctggtcatcaccctgtactgcaagcggggtcggaaaaagcttctgtacattttcaagcagcccttcatgaggcccgtgcaaaccacccaggaggaggacggttgctcctgccggttccccgaagaggaagaaggaggttgcgagctgcgcgtgaagttctcccggagcgccgacgcccccgcctataagcagggccagaaccagctgtacaacgaactgaacctgggacggcgggaagagtacgatgtgctggacaagcggcgcggccgggaccccgaaatgggcgggaagcctagaagaaagaaccctcaggaaggcctgtataacgagctgcagaaggacaagatggccgaggcctactccgaaattgggatgaagggagagcggcggaggggaaaggggcacgacggcctgtaccaaggactgtccaccgccaccaaggacacatacgatgccctgcacatgcaggcccttccccctcgc

SEQ ID NO: 1038 - protein, 40 aa, Artificial Sequence
  source: /note="Description of Artificial Sequence: Synthetic polypeptide"
  SITE (1)..(40): /note="This sequence may encompass 1-10 'Gly Gly Gly Ser' repeating units"
GGGSGGGSGGGSGGGSGGGSGGGSGGGSGGGSGGGSGGGS

SEQ ID NO: 1039 - protein, 20 aa, Artificial Sequence
  source: /note="Description of Artificial Sequence: Synthetic peptide"
GGGGSGGGGSGGGGSGGGGS

SEQ ID NO: 1040 - protein, 15 aa, Artificial Sequence
  source: /note="Description of Artificial Sequence: Synthetic peptide"
GGGGSGGGGSGGGGS

SEQ ID NO: 1041 - protein, 4 aa, Artificial Sequence
  source: /note="Description of Artificial Sequence: Synthetic peptide"
GGGS

SEQ ID NO: 1042 - protein, 17 aa, Artificial Sequence
  source: /note="Description of Artificial Sequence: Synthetic peptide"
ASGGGGSGGRASGGGGS

SEQ ID NO: 1043 - DNA, 5000 bp, Artificial Sequence
  source: /note="Description of Artificial Sequence: Synthetic polynucleotide"
  misc_feature (1)..(5000): /note="This sequence may encompass 50-5000 nucleotides"
  source: /note="See specification as filed for detailed description of substitutions and preferred embodiments"
aaaaaaaaaaaaaaaaaaaaaaaaaaaaaaaaaaaaaaaaaaaaaaaaaaaaaaaaaaaaaaaaaaaaaaaaaaaaaaaaaaaaaaaaaaaaaaaaaaaaaaaaaaaaaaaaaaaaaaaaaaaaaaaaaaaaaaaaaaaaaaaaaaaaaaaaaaaaaaaaaaaaaaaaaaaaaaaaaaaaaaaaaaaaaaaaaaaaaaaaaaaaaaaaaaaaaaaaaaaaaaaaaaaaaaaaaaaaaaaaaaaaaaaaaaaaaaaaaaaaaaaaaaaaaaaaaaaaaaaaaaaaaaaaaaaaaaaaaaaaaaaaaaaaaaaaaaaaaaaaaaaaaaaaaaaaaaaaaaaaaaaaaaaaaaaaaaaaaaaaaaaaaaaaaaaaaaaaaaaaaaaaaaaaaaaaaaaaaaaaaaaaaaaaaaaaaaaaaaaaaaaaaaaaaaaaaaaaaaaaaaaaaaaaaaaaaaaaaaaaaaaaaaaaaaaaaaaaaaaaaaaaaaaaaaaaaaaaaaaaaaaaaaaaaaaaaaaaaaaaaaaaaaaaaaaaaaaaaaaaaaaaaaaaaaaaaaaaaaaaaaaaaaaaaaaaaaaaaaaaaaaaaaaaaaaaaaaaaaaaaaaaaaaaaaaaaaaaaaaaaaaaaaaaaaaaaaaaaaaaaaaaaaaaaaaaaaaaaaaaaaaaaaaaaaaaaaaaaaaaaaaaaaaaaaaaaaaaaaaaaaaaaaaaaaaaaaaaaaaaaaaaaaaaaaaaaaaaaaaaaaaaaaaaaaaaaaaaaaaaaaaaaaaaaaaaaaaaaaaaaaaaaaaaaaaaaaaaaaaaaaaaaaaaaaaaaaaaaaaaaaaaaaaaaaaaaaaaaaaaaaaaaaaaaaaaaaaaaaaaaaaaaaaaaaaaaaaaaaaaaaaaaaaaaaaaaaaaaaaaaaaaaaaaaaaaaaaaaaaaaaaaaaaaaaaaaaaaaaaaaaaaaaaaaaaaaaaaaaaaaaaaaaaaaaaaaaaaaaaaaaaaaaaaaaaaaaaaaaaaaaaaaaaaaaaaaaaaaaaaaaaaaaaaaaaaaaaaaaaaaaaaaaaaaaaaaaaaaaaaaaaaaaaaaaaaaaaaaaaaaaaaaaaaaaaaaaaaaaaaaaaaaaaaaaaaaaaaaaaaaaaaaaaaaaaaaaaaaaaaaaaaaaaaaaaaaaaaaaaaaaaaaaaaaaaaaaaaaaaaaaaaaaaaaaaaaaaaaaaaaaaaaaaaaaaaaaaaaaaaaaaaaaaaaaaaaaaaaaaaaaaaaaaaaaaaaaaaaaaaaaaaaaaaaaaaaaaaaaaaaaaaaaaaaaaaaaaaaaaaaaaaaaaaaaaaaaaaaaaaaaaaaaaaaaaaaaaaaaaaaaaaaaaaaaaaaaaaaaaaaaaaaaaaaaaaaaaaaaaaaaaaaaaaaaaaaaaaaaaaaaaaaaaaaaaaaaaaaaaaaaaaaaaaaaaaaaaaaaaaaaaaaaaaaaaaaaaaaaaaaaaaaaaaaaaaaaaaaaaaaaaaaaaaaaaaaaaaaaaaaaaaaaaaaaaaaaaaaaaaaaaaaaaaaaaaaaaaaaaaaaaaaaaaaaaaaaaaaaaaaaaaaaaaaaaaaaaaaaaaaaaaaaaaaaaaaaaaaaaaaaaaaaaaaaaaaaaaaaaaaaaaaaaaaaaaaaaaaaaaaaaaaaaaaaaaaaaaaaaaaaaaaaaaaaaaaaaaaaaaaaaaaaaaaaaaaaaaaaaaaaaaaaaaaaaaaaaaaaaaaaaaaaaaaaaaaaaaaaaaaaaaaaaaaaaaaaaaaaaaaaaaaaaaaaaaaaaaaaaaaaaaaaaaaaaaaaaaaaaaaaaaaaaaaaaaaaaaaaaaaaaaaaaaaaaaaaaaaaaaaaaaaaaaaaaaaaaaaaaaaaaaaaaaaaaaaaaaaaaaaaaaaaaaaaaaaaaaaaaaaaaaaaaaaaaaaaaaaaaaaaaaaaaaaaaaaaaaaaaaaaaaaaaaaaaaaaaaaaaaaaaaaaaaaaaaaaaaaaaaaaaaaaaaaaaaaaaaaaaaaaaaaaaaaaaaaaaaaaaaaaaaaaaaaaaaaaaaaaaaaaaaaaaaaaaaaaaaaaaaaaaaaaaaaaaaaaaaaaaaaaaaaaaaaaaaaaaaaaaaaaaaaaaaaaaaaaaaaaaaaaaaaaaaaaaaaaaaaaaaaaaaaaaaaaaaaaaaaaaaaaaaaaaaaaaaaaaaaaaaaaaaaaaaaaaaaaaaaaaaaaaaaaaaaaaaaaaaaaaaaaaaaaaaaaaaaaaaaaaaaaaaaaaaaaaaaaaaaaaaaaaaaaaaaaaaaaaaaaaaaaaaaaaaaaaaaaaaaaaaaaaaaaaaaaaaaaaaaaaaaaaaaaaaaaaaaaaaaaaaaaaaaaaaaaaaaaaaaaaaaaaaaaaaaaaaaaaaaaaaaaaaaaaaaaaaaaaaaaaaaaaaaaaaaaaaaaaaaaaaaaaaaaaaaaaaaaaaaaaaaaaaaaaaaaaaaaaaaaaaaaaaaaaaaaaaaaaaaaaaaaaaaaaaaaaaaaaaaaaaaaaaaaaaaaaaaaaaaaaaaaaaaaaaaaaaaaaaaaaaaaaaaaaaaaaaaaaaaaaaaaaaaaaaaaaaaaaaaaaaaaaaaaaaaaaaaaaaaaaaaaaaaaaaaaaaaaaaaaaaaaaaaaaaaaaaaaaaaaaaaaaaaaaaaaaaaaaaaaaaaaaaaaaaaaaaaaaaaaaaaaaaaaaaaaaaaaaaaaaaaaaaaaaaaaaaaaaaaaaaaaaaaaaaaaaaaaaaaaaaaaaaaaaaaaaaaaaaaaaaaaaaaaaaaaaaaaaaaaaaaaaaaaaaaaaaaaaaaaaaaaaaaaaaaaaaaaaaaaaaaaaaaaaaaaaaaaaaaaaaaaaaaaaaaaaaaaaaaaaaaaaaaaaaaaaaaaaaaaaaaaaaaaaaaaaaaaaaaaaaaaaaaaaaaaaaaaaaaaaaaaaaaaaaaaaaaaaaaaaaaaaaaaaaaaaaaaaaaaaaaaaaaaaaaaaaaaaaaaaaaaaaaaaaaaaaaaaaaaaaaaaaaaaaaaaaaaaaaaaaaaaaaaaaaaaaaaaaaaaaaaaaaaaaaaaaaaaaaaaaaaaaaaaaaaaaaaaaaaaaaaaaaaaaaaaaaaaaaaaaaaaaaaaaaaaaaaaaaaaaaaaaaaaaaaaaaaaaaaaaaaaaaaaaaaaaaaaaaaaaaaaaaaaaaaaaaaaaaaaaaaaaaaaaaaaaaaaaaaaaaaaaaaaaaaaaaaaaaaaaaaaaaaaaaaaaaaaaaaaaaaaaaaaaaaaaaaaaaaaaaaaaaaaaaaaaaaaaaaaaaaaaaaaaaaaaaaaaaaaaaaaaaaaaaaaaaaaaaaaaaaaaaaaaaaaaaaaaaaaaaaaaaaaaaaaaaaaaaaaaaaaaaaaaaaaaaaaaaaaaaaaaaaaaaaaaaaaaaaaaaaaaaaaaaaaaaaaaaaaaaaaaaaaaaaaaaaaaaaaaaaaaaaaaaaaaaaaaaaaaaaaaaaaaaaaaaaaaaaaaaaaaaaaaaaaaaaaaaaaaaaaaaaaaaaaaaaaaaaaaaaaaaaaaaaaaaaaaaaaaaaaaaaaaaaaaaaaaaaaaaaaaaaaaaaaaaaaaaaaaaaaaaaaaaaaaaaaaaaaaaaaaaaaaaaaaaaaaaaaaaaaaaaaaaaaaaaaaaaaaaaaaaaaaaaaaaaaaaaaaaaaaaaaaaaaaaaaaaaaaaaaaaaaaaaaaaaaaaaaaaaaaaaaaaaaaaaaaaaaaaaaaaaaaaaaaaaaaaaaaaaaaaaaaaaaaaaaaaaaaaaaaaaaaaaaaaaaaaaaaaaaaaaaaaaaaaaaaaaaaaaaaaaaaaaaaaaaaaaaaaaaaaaaaaaaaaaaaaaaaaaaaaaaaaaaaaaaaaaaaaaaaaaaaaaaaaaaaaaaaaaaaaaaaaaaaaaaaaaaaaaaaaaaaaaaaaaaaaaaaaaaaaaaaaaaaaaaaaaaaaaaaaaaaaaaaaaaaaaaaaaaaaaaaaaaaaaaaaaaaaaaaaaaaaaaaaaaaaaaaaaaaaaaaaaaaaaaaaaaaaaaaaaaaaaaaaaaaaaaaaaaaaaaaaaaaaaaaaaaaaaaaaaaaaaaaaaaaaaaaaaaaaaaaaaaaaaaaaaaaaaaaaaaaaaaaaaaaaaaaaaaaaaaaaaaaaaaaaaaaaaaaaaaaaaaaaaaaaaaaaaaaaaaaaaaaaaaaaaaaaaaaaaaaaaaaaaaaaaaaaaaaaaaaaaaaaaaaaaaaaaaaaaaaaaaaaaaaaaaaaaaaaaaaaaaaaaaaaaaaaaaaaaaaaaaaaaaaaaaaaaaaaaaaaaaaaaaaaaaaaaaaaaaaaaaaaaaaaaaaaaaaaaaaaaaaaaaaaaaaaaaaaaaaaaaaaaaaaaaaaaaaaaaaaaaaaaaaaaaaaaaaaaaaaaaaaaaaaaaaaaaaaaaaaaaaaaaaaaaaaaaaaaaaaaaaaaaaaaaaaaaaaaaaaaaaaaaaaaaaaaaaaaaaaaaaaaaaaaaaaaaaaaaaaaaaaaaaaaaaaaaaaaaaaaaaaaaaaaaaaaaaaaaaaaaaaaaaaaaaaaaaaaaaaaaaaaaaaaaaaaaaaaaaaaaaaaaaaaaaaaaaaaaaaaaaaaaaaaaaaaaaaaaaaaaaaaaaaaaaaaaaaaaaaaaaaaaaaaaaaaaaaaaaaaaaaaaaaaaaaaaaaaaaaaaaaaaaaaaaaaaaaaaaaaaaaaaaaaaaaaaaaaaaaaaaaaaaaaaaaaaaaaaaaaaaaaaaaaaaaaaaaaaaaaaaaaaaaaaaaaaaaaaaaaaaaaaaaaaaaaaaaaaaaaaaaaaaaaaaaaaaaaaaaaaaaaaaaaaaaaaaaaaaaaaaaaaaaaaaaaaaaaaaaaaaaaaaaaaaaaaaaaaaaaaaaaaaaaaaaaaaaaaaaaaaaaaaaaaaaaaaaaaaaaaaaaaaaaaaaaaaaaaaaaaaaaaaaaaaaaaaaaaaaaaaaaaaaaaaaaaaaaaaaaaaaaaaaaaaaaaaaaaaaaaaaaaaaaaa

SEQ ID NO: 1044 - protein, 373 aa, Artificial Sequence
  source: /note="Description of Artificial Sequence: Synthetic polypeptide"
PGWFLDSPDRPWNPPTFSPALLVVTEGDNATFTCSFSNTSESFVLNWYRMSPSNQTDKLAAFPEDRSQPGQDCRFRVTQLPNGRDFHMSVVRARRNDSGTYLCGAISLAPKAQIKESLRAELRVTERRAEVPTAHPSPSPRPAGQFQTLVTTTPAPRPPTPAPTIASQPLSLRPEACRPAAGGAVHTRGLDFACDIYIWAPLAGTCGVLLLSLVITLYCKRGRKKLLYIFKQPFMRPVQTTQEEDGCSCRFPEEEEGGCELRVKFSRSADAPAYKQGQNQLYNELNLGRREEYDVLDKRRGRDPEMGGKPRRKNPQEGLYNELQKDKMAEAYSEIGMKGERRRGKGHDGLYQGLSTATKDTYDALHMQALPPR

SEQ ID NO: 1045 - protein, 35 aa, Artificial Sequence
  source: /note="Description of Artificial Sequence: Synthetic polypeptide"
TKKKYSSSVHDPNGEYMFMRAVNTAKKSRLTDVTL

SEQ ID NO: 1046 - DNA, 105 bp, Artificial Sequence
  source: /note="Description of Artificial Sequence: Synthetic polynucleotide"
acaaaaaagaagtattcatccagtgtgcacgaccctaacggtgaatacatgttcatgagagcagtgaacacagccaaaaaatccagactcacagatgtgacccta

SEQ ID NO: 1047 - protein, 69 aa, Artificial Sequence
  source: /note="Description of Artificial Sequence: Synthetic polypeptide"
TTTPAPRPPTPAPTIASQPLSLRPEACRPAAGGAVHTRGLDFACDFWLPIGCAAFVVVCILGCILICWL

SEQ ID NO: 1048 - DNA, 207 bp, Artificial Sequence
  source: /note="Description of Artificial Sequence: Synthetic polynucleotide"
accacgacgccagcgccgcgaccaccaacaccggcgcccaccatcgcgtcgcagcccctgtccctgcgcccagaggcgtgccggccagcggcggggggcgcagtgcacacgagggggctggacttcgcctgtgatttctggttacccataggatgtgcagcctttgttgtagtctgcattttgggatgcatacttatttgttggctt

SEQ ID NO: 1049 - protein, 41 aa, Artificial Sequence
  source: /note="Description of Artificial Sequence: Synthetic polypeptide"
RSKRSRLLHSDYMNMTPRRPGPTRKHYQPYAPPRDFAAYRS

SEQ ID NO: 1050 - DNA, 123 bp, Artificial Sequence; identical to SEQ ID NO: 1026
  source: /note="Description of Artificial Sequence: Synthetic polynucleotide"

SEQ ID NO: 1051 - protein, 5 aa, Artificial Sequence
  source: /note="Description of Artificial Sequence: Synthetic peptide"
NHGMS

SEQ ID NO: 1052 - protein, 5 aa, Artificial Sequence
  source: /note="Description of Artificial Sequence: Synthetic peptide"
NYAMS

SEQ ID NO: 1053 - protein, 5 aa, Artificial Sequence
  source: /note="Description of Artificial Sequence: Synthetic peptide"
DYAMH

SEQ ID NO: 1054 - protein, 5 aa, Artificial Sequence
  source: /note="Description of Artificial Sequence: Synthetic peptide"
NHGMS

SEQ ID NO: 1055 - protein, 5 aa, Artificial Sequence
  source: /note="Description of Artificial Sequence: Synthetic peptide"
NFGIN

SEQ ID NO: 1056 - protein, 5 aa, Artificial Sequence
  source: /note="Description of Artificial Sequence: Synthetic peptide"
SDAMT

SEQ ID NO: 1057 - protein, 5 aa, Artificial Sequence
  source: /note="Description of Artificial Sequence: Synthetic peptide"
NYGIT

SEQ ID NO: 1058 - protein, 5 aa, Artificial Sequence
  source: /note="Description of Artificial Sequence: Synthetic peptide"
NHGMS

SEQ ID NO: 1059 - protein, 5 aa, Artificial Sequence
  source: /note="Description of Artificial Sequence: Synthetic peptide"
NHGMS

SEQ ID NO: 1060 - protein, 5 aa, Artificial Sequence
  source: /note="Description of Artificial Sequence: Synthetic peptide"
NHGMS

SEQ ID NO: 1061 - protein, 5 aa, Artificial Sequence
  source: /note="Description of Artificial Sequence: Synthetic peptide"
DYYMS

SEQ ID NO: 1062 - protein, 5 aa, Artificial Sequence
  source: /note="Description of Artificial Sequence: Synthetic peptide"
DYYMS

SEQ ID NO: 1063 - protein, 5 aa, Artificial Sequence
  source: /note="Description of Artificial Sequence: Synthetic peptide"
NHGMS

SEQ ID NO: 1064 - protein, 5 aa, Artificial Sequence
  source: /note="Description of Artificial Sequence: Synthetic peptide"
NHGMS

SEQ ID NO: 1065 - protein, 5 aa, Artificial Sequence
  source: /note="Description of Artificial Sequence: Synthetic peptide"
NHGMS

SEQ ID NO: 1066 - protein, 7 aa, Artificial Sequence
  source: /note="Description of Artificial Sequence: Synthetic peptide"
SSYYYWG

SEQ ID NO: 1067 - protein, 7 aa, Artificial Sequence
  source: /note="Description of Artificial Sequence: Synthetic peptide"
TSGMCVS

SEQ ID NO: 1068 - protein, 5 aa, Artificial Sequence
  source: /note="Description of Artificial Sequence: Synthetic peptide"
SYSMN

SEQ ID NO: 1069 - protein, 5 aa, Artificial Sequence
  source: /note="Description of Artificial Sequence: Synthetic peptide"
DYYMS

SEQ ID NO: 1070 - protein, 5 aa, Artificial Sequence
  source: /note="Description of Artificial Sequence: Synthetic peptide"
SHYIH

SEQ ID NO: 1071 - protein, 7 aa, Artificial Sequence
  source: /note="Description of Artificial Sequence: Synthetic peptide"
SGGYYWS

SEQ ID NO: 1072 - protein, 5 aa, Artificial Sequence
  source: /note="Description of Artificial Sequence: Synthetic peptide"
SYAIS

SEQ ID NO: 1073 - protein, 7 aa, Artificial Sequence
  source: /note="Description of Artificial Sequence: Synthetic peptide"
SNSAAWN

SEQ ID NO: 1074 - protein, 5 aa, Artificial Sequence
  source: /note="Description of Artificial Sequence: Synthetic peptide"
SYAMS

SEQ ID NO: 1075 - protein, 5 aa, Artificial Sequence
  source: /note="Description of Artificial Sequence: Synthetic peptide"
RYPMS

SEQ ID NO: 1076 - protein, 5 aa, Artificial Sequence
  source: /note="Description of Artificial Sequence: Synthetic peptide"
SYAMS

SEQ ID NO: 1077 - protein, 5 aa, Artificial Sequence
  source: /note="Description of Artificial Sequence: Synthetic peptide"
SYAMS

SEQ ID NO: 1078 - protein, 5 aa, Artificial Sequence
  source: /note="Description of Artificial Sequence: Synthetic peptide"
DYAMH

SEQ ID NO: 1079 - protein, 5 aa, Artificial Sequence
  source: /note="Description of Artificial Sequence: Synthetic peptide"
DYAMH

SEQ ID NO: 1080 - protein, 5 aa, Artificial Sequence
  source: /note="Description of Artificial Sequence: Synthetic peptide"
SYAMS

SEQ ID NO: 1081 - protein, 5 aa, Artificial Sequence
  source: /note="Description of Artificial Sequence: Synthetic peptide"
SYAMS

SEQ ID NO: 1082 - protein, 5 aa, Artificial Sequence
  source: /note="Description of Artificial Sequence: Synthetic peptide"
SYAMS

SEQ ID NO: 1083 - protein, 5 aa, Artificial Sequence
  source: /note="Description of Artificial Sequence: Synthetic peptide"
SYAMS

SEQ ID NO: 1084 - protein, 5 aa, Artificial Sequence
  source: /note="Description of Artificial Sequence: Synthetic peptide"
SYAMS

SEQ ID NO: 1085 - protein, 5 aa, Artificial Sequence
  source: /note="Description of Artificial Sequence: Synthetic peptide"
SYAMS

SEQ ID NO: 1086 - protein, 5 aa, Artificial Sequence
  source: /note="Description of Artificial Sequence: Synthetic peptide"
SYAMS

SEQ ID NO: 1087 - protein, 5 aa, Artificial Sequence
  source: /note="Description of Artificial Sequence: Synthetic peptide"
NFGMN

SEQ ID NO: 1088 - protein, 5 aa, Artificial Sequence
  source: /note="Description of Artificial Sequence: Synthetic peptide"
DYSIN

SEQ ID NO: 1089 - protein, 5 aa, Artificial Sequence
  source: /note="Description of Artificial Sequence: Synthetic peptide"
HYSMN

SEQ ID NO: 1090 - protein, 5 aa, Artificial Sequence
  source: /note="Description of Artificial Sequence: Synthetic peptide"
HYSMN

SEQ ID NO: 1091 - protein, 16 aa, Artificial Sequence
  source: /note="Description of Artificial Sequence: Synthetic peptide"
GIVYSGSTYYAASVKG

SEQ ID NO: 1092 - protein, 17 aa, Artificial Sequence
  source: /note="Description of Artificial Sequence: Synthetic peptide"
GISRSGENTYYADSVKG

SEQ ID NO: 1093 - protein, 17 aa, Artificial Sequence
  source: /note="Description of Artificial Sequence: Synthetic peptide"
GISWNSGSIGYADSVKG

SEQ ID NO: 1094 - protein, 16 aa, Artificial Sequence
  source: /note="Description of Artificial Sequence: Synthetic peptide"
GIVYSGSTYYAASVKG

SEQ ID NO: 1095 - protein, 17 aa, Artificial Sequence
  source: /note="Description of Artificial Sequence: Synthetic peptide"
WINPKNNNTNYAQKFQG

SEQ ID NO: 1096 - protein, 17 aa, Artificial Sequence
  source: /note="Description of Artificial Sequence: Synthetic peptide"
VISGSGGTTYYADSVKG

SEQ ID NO: 1097 - protein, 17 aa, Artificial Sequence
  source: /note="Description of Artificial Sequence: Synthetic peptide"
WISAYNGNTNYAQKFQG

SEQ ID NO: 1098 - protein, 16 aa, Artificial Sequence
  source: /note="Description of Artificial Sequence: Synthetic peptide"
GIVYSGSTYYAASVKG

SEQ ID NO: 1099 - protein, 16 aa, Artificial Sequence
  source: /note="Description of Artificial Sequence: Synthetic peptide"
GIVYSGSTYYAASVKG

SEQ ID NO: 1100 - protein, 16 aa, Artificial Sequence
  source: /note="Description of Artificial Sequence: Synthetic peptide"
GIVYSGSTYYAASVKG

SEQ ID NO: 1101 - protein, 17 aa, Artificial Sequence
  source: /note="Description of Artificial Sequence: Synthetic peptide"
YISSSGSTIYYADSVKG

SEQ ID NO: 1102 - protein, 17 aa, Artificial Sequence
  source: /note="Description of Artificial Sequence: Synthetic peptide"
YISSSGNTIYYADSVKG

SEQ ID NO: 1103 - protein, 16 aa, Artificial Sequence
  source: /note="Description of Artificial Sequence: Synthetic peptide"
GIVYSGSTYYAASVKG

SEQ ID NO: 1104 - protein, 16 aa, Artificial Sequence
  source: /note="Description of Artificial Sequence: Synthetic peptide"
GIVYSGSTYYAASVKG

SEQ ID NO: 1105 - protein, 16 aa, Artificial Sequence
  source: /note="Description of Artificial Sequence: Synthetic peptide"
GIVYSGSTYYAASVKG

SEQ ID NO: 1106 - protein, 16 aa, Artificial Sequence
  source: /note="Description of Artificial Sequence: Synthetic peptide"
SIYYSGSAYYNPSLKS

SEQ ID NO: 1107 - protein, 16 aa, Artificial Sequence
  source: /note="Description of Artificial Sequence: Synthetic peptide"
RIDWDEDKFYSTSLKT

SEQ ID NO: 1108 - protein, 17 aa, Artificial Sequence
  source: /note="Description of Artificial Sequence: Synthetic peptide"
SISSSSSYIYYADSVKG

SEQ ID NO: 1109 - protein, 17 aa, Artificial Sequence
  source: /note="Description of Artificial Sequence: Synthetic peptide"
YISSSGSTIYYADSVKG

SEQ ID NO: 1110 - protein, 17 aa, Artificial Sequence
  source: /note="Description of Artificial Sequence: Synthetic peptide"
MINPSGGVTAYSQTLQG

SEQ ID NO: 1111 - protein, 16 aa, Artificial Sequence
  source: /note="Description of Artificial Sequence: Synthetic peptide"
YIYYSGSTYYNPSLKS

SEQ ID NO: 1112 - protein, 17 aa, Artificial Sequence
  source: /note="Description of Artificial Sequence: Synthetic peptide"
GIIPIFGTANYAQKFQG

SEQ ID NO: 1113 - protein, 18 aa, Artificial Sequence
  source: /note="Description of Artificial Sequence: Synthetic peptide"
RTYYRSKWYSFYAISLKS

SEQ ID NO: 1114 - protein, 17 aa, Artificial Sequence
  source: /note="Description of Artificial Sequence: Synthetic peptide"
AISGSGGSTYYADSVKG

SEQ ID NO: 1115 - protein, 17 aa, Artificial Sequence
  source: /note="Description of Artificial Sequence: Synthetic peptide"
GISDSGVSTYYADSAKG

SEQ ID NO: 1116 - protein, 17 aa, Artificial Sequence
  source: /note="Description of Artificial Sequence: Synthetic peptide"
AISGSGGSTYYADSVKG

SEQ ID NO: 1117 - protein, 17 aa, Artificial Sequence
  source: /note="Description of Artificial Sequence: Synthetic peptide"
AISGSGGSTYYADSVKG

SEQ ID NO: 1118 - protein, 17 aa, Artificial Sequence
  source: /note="Description of Artificial Sequence: Synthetic peptide"
GISWNSGSIGYADSVKG

SEQ ID NO: 1119 - protein, 17 aa, Artificial Sequence
  source: /note="Description of Artificial Sequence: Synthetic peptide"
SINWKGNSLAYGDSVKG

SEQ ID NO: 1120 - protein, 17 aa, Artificial Sequence
  source: /note="Description of Artificial Sequence: Synthetic peptide"
AISGSGGSTYYADSVKG

SEQ ID NO: 1121 - protein, 17 aa, Artificial Sequence
  source: /note="Description of Artificial Sequence: Synthetic peptide"
AISGSGGSTYYADSVKG

SEQ ID NO: 1122 - protein, 17 aa, Artificial Sequence
  source: /note="Description of Artificial Sequence: Synthetic peptide"
AISGSGGSTYYADSVKG

SEQ ID NO: 1123 - protein, 17 aa, Artificial Sequence
  source: /note="Description of Artificial Sequence: Synthetic peptide"
AISGSGGSTYYADSVKG

SEQ ID NO: 1124 - protein, 17 aa, Artificial Sequence
  source: /note="Description of Artificial Sequence: Synthetic peptide"
AISGSGGSTYYADSVKG

SEQ ID NO: 1125 - protein, 17 aa, Artificial Sequence
  source: /note="Description of Artificial Sequence: Synthetic peptide"
AISGSGGSTYYADSVKG

SEQ ID NO: 1126 - protein, 17 aa, Artificial Sequence
  source: /note="Description of Artificial Sequence: Synthetic peptide"
AISGSGGSTYYADSVKG

SEQ ID NO: 1127 - protein, 17 aa, Artificial Sequence
  source: /note="Description of Artificial Sequence: Synthetic peptide"
WINTYTGESYFADDFKG

SEQ ID NO: 1128 - protein, 17 aa, Artificial Sequence
  source: /note="Description of Artificial Sequence: Synthetic peptide"
WINTETREPAYAYDFRG

SEQ ID NO: 1129 - protein, 17 aa, Artificial Sequence
  source: /note="Description of Artificial Sequence: Synthetic peptide"
RINTESGVPIYADDFKG

SEQ ID NO: 1130 - protein, 17 aa, Artificial Sequence
  source: /note="Description of Artificial Sequence: Synthetic peptide"
RINTETGEPLYADDFKG

SEQ ID NO: 1131 - protein, 7 aa, Artificial Sequence
  source: /note="Description of Artificial Sequence: Synthetic peptide"
HGGESDV

SEQ ID NO: 1132 - protein, 11 aa, Artificial Sequence
  source: /note="Description of Artificial Sequence: Synthetic peptide"
SPAHYYGGMDV

SEQ ID NO: 1133 - protein, 6 aa, Artificial Sequence
  source: /note="Description of Artificial Sequence: Synthetic peptide"
HSFLAY

SEQ ID NO: 1134 - protein, 7 aa, Artificial Sequence
  source: /note="Description of Artificial Sequence: Synthetic peptide"
HGGESDV

SEQ ID NO: 1135 - protein, 11 aa, Artificial Sequence
  source: /note="Description of Artificial Sequence: Synthetic peptide"
GPYYYQSYMDV

SEQ ID NO: 1136 - protein, 14 aa, Artificial Sequence
  source: /note="Description of Artificial Sequence: Synthetic peptide"
LDSSGYYYARGPRY

SEQ ID NO: 1137 - protein, 9 aa, Artificial Sequence
  source: /note="Description of Artificial Sequence: Synthetic peptide"
GPYYYYMDV

SEQ ID NO: 1138 - protein, 7 aa, Artificial Sequence
  source: /note="Description of Artificial Sequence: Synthetic peptide"
HGGESDV

SEQ ID NO: 1139 - protein, 7 aa, Artificial Sequence
  source: /note="Description of Artificial Sequence: Synthetic peptide"
HGGESDV

SEQ ID NO: 1140 - protein, 7 aa, Artificial Sequence
  source: /note="Description of Artificial Sequence: Synthetic peptide"
HGGESDV

SEQ ID NO: 1141 - protein, 8 aa, Artificial Sequence
  source: /note="Description of Artificial Sequence: Synthetic peptide"
ESGDGMDV

SEQ ID NO: 1142 - protein, 8 aa, Artificial Sequence
  source: /note="Description of Artificial Sequence: Synthetic peptide"
STMVREDY

SEQ ID NO: 1143 - protein, 7 aa, Artificial Sequence
  source: /note="Description of Artificial Sequence: Synthetic peptide"
HGGESDV

SEQ ID NO: 1144 - protein, 7 aa, Artificial Sequence
  source: /note="Description of Artificial Sequence: Synthetic peptide"
HGGESDV

SEQ ID NO: 1145 - protein, 7 aa, Artificial Sequence
  source: /note="Description of Artificial Sequence: Synthetic peptide"
HGGESDV

SEQ ID NO: 1146 - protein, 11 aa, Artificial Sequence
  source: /note="Description of Artificial Sequence: Synthetic peptide"
HWQEWPDAFDI

SEQ ID NO: 1147 - protein, 13 aa, Artificial Sequence
  source: /note="Description of Artificial Sequence: Synthetic peptide"
SGAGGTSATAFDI

SEQ ID NO: 1148 - protein, 10 aa, Artificial Sequence
  source: /note="Description of Artificial Sequence: Synthetic peptide"
TIAAVYAFDI

SEQ ID NO: 1149 - protein, 8 aa, Artificial Sequence
  source: /note="Description of Artificial Sequence: Synthetic peptide"
DLRGAFDI

SEQ ID NO: 1150 - protein, 11 aa, Artificial Sequence
  source: /note="Description of Artificial Sequence: Synthetic peptide"
EGSGSGWYFDF

SEQ ID NO: 1151 - protein, 13 aa, Artificial Sequence
  source: /note="Description of Artificial Sequence: Synthetic peptide"
AGIAARLRGAFDI

SEQ ID NO: 1152 - protein, 20 aa, Artificial Sequence
  source: /note="Description of Artificial Sequence: Synthetic peptide"
RGGYQLLRWDVGLLRSAFDI

SEQ ID NO: 1153 - protein, 13 aa, Artificial Sequence
  source: /note="Description of Artificial Sequence: Synthetic peptide"
SSPEGLFLYWFDP

SEQ ID NO: 1154 - protein, 9 aa, Artificial Sequence
  source: /note="Description of Artificial Sequence: Synthetic peptide"
VEGSGSLDY

SEQ ID NO: 1155 - protein, 9 aa, Artificial Sequence
  source: /note="Description of Artificial Sequence: Synthetic peptide"
RAGSEASDI

SEQ ID NO: 1156 - protein, 15 aa, Artificial Sequence
  source: /note="Description of Artificial Sequence: Synthetic peptide"
ATYKRELRYYYGMDV

SEQ ID NO: 1157 - protein, 15 aa, Artificial Sequence
  source: /note="Description of Artificial Sequence: Synthetic peptide"
ATYKRELRYYYGMDV

SEQ ID NO: 1158 - protein, 8 aa, Artificial Sequence
  source: /note="Description of Artificial Sequence: Synthetic peptide"
VGKAVPDV

SEQ ID NO: 1159 - protein, 13 aa, Artificial Sequence
  source: /note="Description of Artificial Sequence: Synthetic peptide"
HQGVAYYNYAMDV

SEQ ID NO: 1160 - protein, 8 aa, Artificial Sequence
  source: /note="Description of Artificial Sequence: Synthetic peptide"
VVRDGMDV

SEQ ID NO: 1161 - protein, 9 aa, Artificial Sequence
  source: /note="Description of Artificial Sequence: Synthetic peptide"
IPQTGTFDY

SEQ ID NO: 1162 - protein, 15 aa, Artificial Sequence
  source: /note="Description of Artificial Sequence: Synthetic peptide"
ANYKRELRYYYGMDV

SEQ ID NO: 1163 - protein, 11 aa, Artificial Sequence
  source: /note="Description of Artificial Sequence: Synthetic peptide"
ALVGATGAFDI

SEQ ID NO: 1164 - protein, 8 aa, Artificial Sequence
  source: /note="Description of Artificial Sequence: Synthetic peptide"
WFGEGFDP

SEQ ID NO: 1165 - protein, 17 aa, Artificial Sequence
  source: /note="Description of Artificial Sequence: Synthetic peptide"
VGYDSSGYYRDYYGMDV

SEQ ID NO: 1166 - protein, 13 aa, Artificial Sequence
  source: /note="Description of Artificial Sequence: Synthetic peptide"
MGWSSGYLGAFDI

SEQ ID NO: 1167 - protein, 13 aa, Artificial Sequence
  source: /note="Description of Artificial Sequence: Synthetic peptide"
GEIYYGYDGGFAY

SEQ ID NO: 1168 - protein, 8 aa, Artificial Sequence
  source: /note="Description of Artificial Sequence: Synthetic peptide"
DYSYAMDY

SEQ ID NO: 1169 - protein, 8 aa, Artificial Sequence
  source: /note="Description of Artificial Sequence: Synthetic peptide"
DYLYSLDF

SEQ ID NO: 1170 - protein, 8 aa, Artificial Sequence
  source: /note="Description of Artificial Sequence: Synthetic peptide"
DYLYSCDY

SEQ ID NO: 1171 - protein, 11 aa, Artificial Sequence
  source: /note="Description of Artificial Sequence: Synthetic peptide"
RASQSISSYLN

SEQ ID NO: 1172 - protein, 12 aa, Artificial Sequence
  source: /note="Description of Artificial Sequence: Synthetic peptide"
RASQSISSSFLA

SEQ ID NO: 1173 - protein, 16 aa, Artificial Sequence
  source: /note="Description of Artificial Sequence: Synthetic peptide"
RSSQSLLHSNGYNYLD

SEQ ID NO: 1174 - protein, 16 aa, Artificial Sequence
  source: /note="Description of Artificial Sequence: Synthetic peptide"
KSSQSLLRNDGKTPLY

SEQ ID NO: 1175 - protein, 16 aa, Artificial Sequence
  source: /note="Description of Artificial Sequence: Synthetic peptide"
RSSQSLLHSNGYNYLN

SEQ ID NO: 1176 - protein, 11 aa, Artificial Sequence
  source: /note="Description of Artificial Sequence: Synthetic peptide"
RASQSISSYLN

SEQ ID NO: 1177 - protein, 16 aa, Artificial Sequence
  source: /note="Description of Artificial Sequence: Synthetic peptide"
RSSQSLLYSNGYNYVD

SEQ ID NO: 1178 - protein, 11 aa, Artificial Sequence
  source: /note="Description of Artificial Sequence: Synthetic peptide"
RASQSVSSNLA

SEQ ID NO: 1179 - protein, 11 aa, Artificial Sequence
  source: /note="Description of Artificial Sequence: Synthetic peptide"
RASQSVSSKLA

SEQ ID NO: 1180 - protein, 12 aa, Artificial Sequence
  source: /note="Description of Artificial Sequence: Synthetic peptide"
RASQSVGSTNLA

SEQ ID NO: 1181 - protein, 11 aa, Artificial Sequence
  source: /note="Description of Artificial Sequence: Synthetic peptide"
RASQSISSYLN

SEQ ID NO: 1182 - protein, 16 aa, Artificial Sequence
  source: /note="Description of Artificial Sequence: Synthetic peptide"
KSSESLVHNSGKTYLN

SEQ ID NO: 1183 - protein, 11 aa, Artificial Sequence
  source: /note="Description of Artificial Sequence: Synthetic peptide"
QASEDINKFLN

SEQ ID NO: 1184 - protein, 11 aa, Artificial Sequence
  source: /note="Description of Artificial Sequence: Synthetic peptide"
RASQSVGSNLA

SEQ ID NO: 1185 - protein, 12 aa, Artificial Sequence
  source: /note="Description of Artificial Sequence: Synthetic peptide"
RASQSIGSSSLA

SEQ ID NO: 1186 - protein, 11 aa, Artificial Sequence
  source: /note="Description of Artificial Sequence: Synthetic peptide"
KASQDIDDAMN

SEQ ID NO: 1187 - protein, 11 aa, Artificial Sequence
  source: /note="Description of Artificial Sequence: Synthetic peptide"
RASQDIYNNLA

SEQ ID NO: 1188 - protein, 16 aa, Artificial Sequence
  source: /note="Description of Artificial Sequence: Synthetic peptide"
RSSQSLLHSNGYNYLD

SEQ ID NO: 1189 - protein, 11 aa, Artificial Sequence
  source: /note="Description of Artificial Sequence: Synthetic peptide"
GGNNIGTKSVH

SEQ ID NO: 1190 - protein, 11 aa, Artificial Sequence
  source: /note="Description of Artificial Sequence: Synthetic peptide"
SGDGLSKKYVS

SEQ ID NO: 1191 - protein, 11 aa, Artificial Sequence
  source: /note="Description of Artificial Sequence: Synthetic peptide"
RASQGIRNWLA

SEQ ID NO: 1192 - protein, 11 aa, Artificial Sequence
  source: /note="Description of Artificial Sequence: Synthetic peptide"
GGNNIGSKSVH

SEQ ID NO: 1193 - protein, 11 aa, Artificial Sequence
  source: /note="Description of Artificial Sequence: Synthetic peptide"
QGDSLGNYYAT

SEQ ID NO: 1194 - protein, 12 aa, Artificial Sequence
  source: /note="Description of Artificial Sequence: Synthetic peptide"
RASQSVSSAYLA

SEQ ID NO: 1195 - protein, 11 aa, Artificial Sequence
  source: /note="Description of Artificial Sequence: Synthetic peptide"
RASQSVSNSLA

SEQ ID NO: 1196 - protein, 12 aa, Artificial Sequence
  source: /note="Description of Artificial Sequence: Synthetic peptide"
RASQSVSSSFLA

SEQ ID NO: 1197 - protein, 12 aa, Artificial Sequence
  source: /note="Description of Artificial Sequence: Synthetic peptide"
RASQSVSTTFLA

SEQ ID NO: 1198 - protein, 11 aa, Artificial Sequence
  source: /note="Description of Artificial Sequence: Synthetic peptide"
RASQSISSYLN

SEQ ID NO: 1199 - protein, 12 aa, Artificial Sequence
  source: /note="Description of Artificial Sequence: Synthetic peptide"
RATQSIGSSFLA

SEQ ID NO: 1200 - protein, 12 aa, Artificial Sequence
  source: /note="Description of Artificial Sequence: Synthetic peptide"
RASQSVSSSYLA

SEQ ID NO: 1201 - protein, 12 aa, Artificial Sequence
  source: /note="Description of Artificial Sequence: Synthetic peptide"
RASQSVSSSYLA

SEQ ID NO: 1202 - protein, 12 aa, Artificial Sequence
  source: /note="Description of Artificial Sequence: Synthetic peptide"
RASQRVASNYLA

SEQ ID NO: 1203 - protein, 12 aa, Artificial Sequence
  source: /note="Description of Artificial Sequence: Synthetic peptide"
RASQSLSSNFLA

SEQ ID NO: 1204 - protein, 16 aa, Artificial Sequence
  source: /note="Description of Artificial Sequence: Synthetic peptide"
RSSQSLLHSNGYNYLD

SEQ ID NO: 1205 - protein, 12 aa, Artificial Sequence
  source: /note="Description of Artificial Sequence: Synthetic peptide"
RASQSVSSSYLA

SEQ ID NO: 1206 - protein, 12 aa, Artificial Sequence
  source: /note="Description of Artificial Sequence: Synthetic peptide"
RASQSVASSFLA

SEQ ID NO: 1207 - protein, 11 aa, Artificial Sequence
  source: /note="Description of Artificial Sequence: Synthetic peptide"
RASQDVNTAVS

SEQ ID NO: 1208 - protein, 15 aa, Artificial Sequence
  source: /note="Description of Artificial Sequence: Synthetic peptide"
RASESVSVIGAHLIH

SEQ ID NO: 1209 - protein, 15 aa, Artificial Sequence
  source: /note="Description of Artificial Sequence: Synthetic peptide"
RASESVTILGSHLIY

SEQ ID NO: 1210 - protein, 15 aa, Artificial Sequence
  source: /note="Description of Artificial Sequence: Synthetic peptide"
RASESVTILGSHLIY

SEQ ID NO: 1211 - protein, 7 aa, Artificial Sequence
  source: /note="Description of Artificial Sequence: Synthetic peptide"
AASSLQS

SEQ ID NO: 1212 - protein, 7 aa, Artificial Sequence
  source: /note="Description of Artificial Sequence: Synthetic peptide"
GASRRAT

SEQ ID NO: 1213 - protein, 7 aa, Artificial Sequence
  source: /note="Description of Artificial Sequence: Synthetic peptide"
LGSNRAS

SEQ ID NO: 1214 - protein, 7 aa, Artificial Sequence
  source: /note="Description of Artificial Sequence: Synthetic peptide"
EVSNRFS

SEQ ID NO: 1215 - protein, 7 aa, Artificial Sequence
  source: /note="Description of Artificial Sequence: Synthetic peptide"
LGSKRAS

SEQ ID NO: 1216 - protein, 7 aa, Artificial Sequence
  source: /note="Description of Artificial Sequence: Synthetic peptide"
GASTLAS

SEQ ID NO: 1217 - protein, 7 aa, Artificial Sequence
  source: /note="Description of Artificial Sequence: Synthetic peptide"
LGSNRAS

SEQ ID NO: 1218 - protein, 7 aa, Artificial Sequence
  source: /note="Description of Artificial Sequence: Synthetic peptide"
GASTRAS

SEQ ID NO: 1219 - protein, 7 aa, Artificial Sequence
  source: /note="Description of Artificial Sequence: Synthetic peptide"
GASIRAT

SEQ ID NO: 1220 - protein, 7 aa, Artificial Sequence
  source: /note="Description of Artificial Sequence: Synthetic peptide"
DASNRAT

SEQ ID NO: 1221 - protein, 7 aa, Artificial Sequence
  source: /note="Description of Artificial Sequence: Synthetic peptide"
AASSLQS

SEQ ID NO: 1222 - protein, 7 aa, Artificial Sequence
  source: /note="Description of Artificial Sequence: Synthetic peptide"
EVSNRDS

SEQ ID NO: 1223 - protein, 7 aa, Artificial Sequence
  source: /note="Description of Artificial Sequence: Synthetic peptide"
DASTLQT

SEQ ID NO: 1224 - protein, 7 aa, Artificial Sequence
  source: /note="Description of Artificial Sequence: Synthetic peptide"
GASTRAT

SEQ ID NO: 1225 - protein, 7 aa, Artificial Sequence
  source: /note="Description of Artificial Sequence: Synthetic peptide"
GASSRAS

SEQ ID NO: 1226 - protein, 7 aa, Artificial Sequence
  source: /note="Description of Artificial Sequence: Synthetic peptide"
SATSPVP

SEQ ID NO: 1227 - protein, 7 aa, Artificial Sequence
  source: /note="Description of Artificial Sequence: Synthetic peptide"
AANKSQS

SEQ ID NO: 1228 - protein, 7 aa, Artificial Sequence
  source: /note="Description of Artificial Sequence: Synthetic peptide"
LGSNRAS

SEQ ID NO: 1229 - protein, 7 aa, Artificial Sequence
  source: /note="Description of Artificial Sequence: Synthetic peptide"
DDSVRPS

SEQ ID NO: 1230 - protein, 7 aa, Artificial Sequence
  source: /note="Description of Artificial Sequence: Synthetic peptide"
RDKERPS

SEQ ID NO: 1231 - protein, 7 aa, Artificial Sequence
  source: /note="Description of Artificial Sequence: Synthetic peptide"
AASNLQS

SEQ ID NO: 1232 - protein, 7 aa, Artificial Sequence
  source: /note="Description of Artificial Sequence: Synthetic peptide"
GKNNRPS

SEQ ID NO: 1233 - protein, 7 aa, Artificial Sequence
  source: /note="Description of Artificial Sequence: Synthetic peptide"
GTNNRPS

SEQ ID NO: 1234 - protein, 7 aa, Artificial Sequence
  source: /note="Description of Artificial Sequence: Synthetic peptide"
GASTRAT

SEQ ID NO: 1235 - protein, 7 aa, Artificial Sequence
  source: /note="Description of Artificial Sequence: Synthetic peptide"
DASSRAT

SEQ ID NO: 1236 - protein, 7 aa, Artificial Sequence
  source: /note="Description of Artificial Sequence: Synthetic peptide"
GASSRAT

SEQ ID NO: 1237 - protein, 7 aa, Artificial Sequence
  source: /note="Description of Artificial Sequence: Synthetic peptide"
GSSNRAT

SEQ ID NO: 1238 - protein, 7 aa, Artificial Sequence
  source: /note="Description of Artificial Sequence: Synthetic peptide"
AASSLQS

SEQ ID NO: 1239 - protein, 7 aa, Artificial Sequence
  source: /note="Description of Artificial Sequence: Synthetic peptide"
GASQRAT

SEQ ID NO: 1240 - protein, 7 aa, Artificial Sequence
  source: /note="Description of Artificial Sequence: Synthetic peptide"
GASSRAT

SEQ ID NO: 1241 - protein, 7 aa, Artificial Sequence
  source: /note="Description of Artificial Sequence: Synthetic peptide"
GASSRAT

SEQ ID NO: 1242 - protein, 7 aa, Artificial Sequence
  source: /note="Description of Artificial Sequence: Synthetic peptide"
GASSRAT

SEQ ID NO: 1243 - protein, 7 aa, Artificial Sequence
  source: /note="Description of Artificial Sequence: Synthetic peptide"
GASNWAT

SEQ ID NO: 1244 - protein, 7 aa, Artificial Sequence
  source: /note="Description of Artificial Sequence: Synthetic peptide"
LGSNRAS

SEQ ID NO: 1245 - protein, 7 aa, Artificial Sequence
  source: /note="Description of Artificial Sequence: Synthetic peptide"
GTSSRAT

SEQ ID NO: 1246 - protein, 7 aa, Artificial Sequence
  source: /note="Description of Artificial Sequence: Synthetic peptide"
GASGRAT

SEQ ID NO: 1247 - protein, 7 aa, Artificial Sequence
  source: /note="Description of Artificial Sequence: Synthetic peptide"
SASYRYT

SEQ ID NO: 1248 - protein, 7 aa, Artificial Sequence
  source: /note="Description of Artificial Sequence: Synthetic peptide"
LASNLET

SEQ ID NO: 1249 - protein, 7 aa, Artificial Sequence
  source: /note="Description of Artificial Sequence: Synthetic peptide"
LASNVQT

SEQ ID NO: 1250 - protein, 7 aa, Artificial Sequence
  source: /note="Description of Artificial Sequence: Synthetic peptide"
LASNVQT

SEQ ID NO: 1251 - protein, 9 aa, Artificial Sequence
  source: /note="Description of Artificial Sequence: Synthetic peptide"
QQSYSTPYT

SEQ ID NO: 1252 - protein, 10 aa, Artificial Sequence
  source: /note="Description of Artificial Sequence: Synthetic peptide"
QQYHSSPSWT

SEQ ID NO: 1253 - protein, 9 aa, Artificial Sequence
  source: /note="Description of Artificial Sequence: Synthetic peptide"
MQALQTPYT

SEQ ID NO: 1254 - protein, 8 aa, Artificial Sequence
  source: /note="Description of Artificial Sequence: Synthetic peptide"
MQNIQFPS

SEQ ID NO: 1255 - protein, 9 aa, Artificial Sequence
  source: /note="Description of Artificial Sequence: Synthetic peptide"
MQALQTPYT

SEQ ID NO: 1256 - protein, 8 aa, Artificial Sequence
  source: /note="Description of Artificial Sequence: Synthetic peptide"
QQSYKRAS

SEQ ID NO: 1257 - protein, 9 aa, Artificial Sequence
  source: /note="Description of Artificial Sequence: Synthetic peptide"
MQGRQFPYS

SEQ ID NO: 1258 - protein, 8 aa, Artificial Sequence
  source: /note="Description of Artificial Sequence: Synthetic peptide"
QQYGSSLT

SEQ ID NO: 1259 - protein, 9 aa, Artificial Sequence
  source: /note="Description of Artificial Sequence: Synthetic peptide"
QQYGSSSWT

SEQ ID NO: 1260 - protein, 10 aa, Artificial Sequence
  source: /note="Description of Artificial Sequence: Synthetic peptide"
QQYGSSPPWT

SEQ ID NO: 1261 - protein, 7 aa, Artificial Sequence
  source: /note="Description of Artificial Sequence: Synthetic peptide"
QQSYTLA

SEQ ID NO: 1262 - protein, 9 aa, Artificial Sequence
  source: /note="Description of Artificial Sequence: Synthetic peptide"
MQGTHWPGT

SEQ ID NO: 1263 - protein, 9 aa, Artificial Sequence
  source: /note="Description of Artificial Sequence: Synthetic peptide"
QQYESLPLT

SEQ ID NO: 1264 - protein, 10 aa, Artificial Sequence
  source: /note="Description of Artificial Sequence: Synthetic peptide"
QQYNDWLPVT

SEQ ID NO: 1265 - protein, 10 aa, Artificial Sequence
  source: /note="Description of Artificial Sequence: Synthetic peptide"
QQYAGSPPFT

SEQ ID NO: 1266 - protein, 9 aa, Artificial Sequence
  source: /note="Description of Artificial Sequence: Synthetic peptide"
LQHDNFPLT

SEQ ID NO: 1267 - protein, 9 aa, Artificial Sequence
  source: /note="Description of Artificial Sequence: Synthetic peptide"
QHYYRFPYS

SEQ ID NO: 1268 - protein, 9 aa, Artificial Sequence
  source: /note="Description of Artificial Sequence: Synthetic peptide"
MQALQTPYT

SEQ ID NO: 1269 - protein, 11 aa, Artificial Sequence
  source: /note="Description of Artificial Sequence: Synthetic peptide"
QVWDSDSEHVV

SEQ ID NO: 1270 - protein, 9 aa, Artificial Sequence
  source: /note="Description of Artificial Sequence: Synthetic peptide"
QAWDDTTVV

SEQ ID NO: 1271 - protein, 9 aa, Artificial Sequence
  source: /note="Description of Artificial Sequence: Synthetic peptide"
QKYNSAPFT

SEQ ID NO: 1272 - protein, 12 aa, Artificial Sequence
  source: /note="Description of Artificial Sequence: Synthetic peptide"
SSRDSSGDHLRV

SEQ ID NO: 1273 - protein, 11 aa, Artificial Sequence
  source: /note="Description of Artificial Sequence: Synthetic peptide"
NSRDSSGHHLL

SEQ ID NO: 1274 - protein, 14 aa, Artificial Sequence
  source: /note="Description of Artificial Sequence: Synthetic peptide"
QHYGSSFNGSSLFT

SEQ ID NO: 1275 - protein, 10 aa, Artificial Sequence
  source: /note="Description of Artificial Sequence: Synthetic peptide"
QQFGTSSGLT

SEQ ID NO: 1276 - protein, 10 aa, Artificial Sequence
  source: /note="Description of Artificial Sequence: Synthetic peptide"
QQYHSSPSWT

SEQ ID NO: 1277 - protein, 10 aa, Artificial Sequence
  source: /note="Description of Artificial Sequence: Synthetic peptide"
QQYHSSPSWT

SEQ ID NO: 1278 - protein, 9 aa, Artificial Sequence
  source: /note="Description of Artificial Sequence: Synthetic peptide"
QQSYSTPYS

SEQ ID NO: 1279 - protein, 10 aa, Artificial Sequence
  source: /note="Description of Artificial Sequence: Synthetic peptide"
QHYESSPSWT

SEQ ID NO: 1280 - protein, 10 aa, Artificial Sequence
  source: /note="Description of Artificial Sequence: Synthetic peptide"
QQYGSPPRFT

SEQ ID NO: 1281 - protein, 10 aa, Artificial Sequence
  source: /note="Description of Artificial Sequence: Synthetic peptide"
QHYGSSPSWT

SEQ ID NO: 1282 - protein, 10 aa, Artificial Sequence
  source: /note="Description of Artificial Sequence: Synthetic peptide"
QHYDSSPSWT

SEQ ID NO: 1283 - protein, 10 aa, Artificial Sequence
  source: /note="Description of Artificial Sequence: Synthetic peptide"
QYYGTSPMYT

SEQ ID NO: 1284 - protein, 9 aa, Artificial Sequence
  source: /note="Description of Artificial Sequence: Synthetic peptide"
MQALQTPLT

SEQ ID NO: 1285 - protein, 11 aa, Artificial Sequence
  source: /note="Description of Artificial Sequence: Synthetic peptide"
QHYGNSPPKFT

SEQ ID NO: 1286 - protein, 10 aa, Artificial Sequence
  source: /note="Description of Artificial Sequence: Synthetic peptide"
QHYGGSPRLT

SEQ ID NO: 1287 - protein, 9 aa, Artificial Sequence
  source: /note="Description of Artificial Sequence: Synthetic peptide"
QQHYSTPWT

SEQ ID NO: 1288 - protein, 9 aa, Artificial Sequence
  source: /note="Description of Artificial Sequence: Synthetic peptide"
LQSRIFPRT

SEQ ID NO: 1289 - protein, 9 aa, Artificial Sequence
  source: /note="Description of Artificial Sequence: Synthetic peptide"
LQSRTIPRT

SEQ ID NO: 1290 - protein, 9 aa, Artificial Sequence
  source: /note="Description of Artificial Sequence: Synthetic peptide"
LQSRTIPRT

SEQ ID NO: 1291 - DNA, 521 bp, Unknown
  source: /note="Description of Unknown: PGK Promoter sequence"
acccctctctccagccactaagccagttgctccctcggctgacggctgcacgcgaggcctccgaacgtcttacgccttgtggcgcgcccgtccttgtcccgggtgtgatggcggggtgtggggcggagggcgtggcggggaagggccggcgacgagagccgcgcgggacgactcgtcggcgataaccggtgtcgggtagcgccagccgcgcgacggtaacgagggaccgcgacaggcagacgctcccatgatcactctgcacgccgaaggcaaatagtgcaggccgtgcggcgcttggcgttccttggaagggctgaatccccgcctcgtccttcgcagcggccccccgggtgttcccatcgccgcttctaggcccactgcgacgcttgcctgcacttcttacacgctctgggtcccagccgcggcgacgcaaagggccttggtgcgggtctcgtcggcgcagggacgcgtttgggtcccgacggaaccttttccgcgttggggttggggcaccataagct

SEQ ID NO: 1292 - DNA, 118 bp, Artificial Sequence
  source: /note="Description of Artificial Sequence: Synthetic polynucleotide"
acccctctctccagccactaagccagttgctccctcggctgacggctgcacgcgaggcctccgaacgtcttacgccttgtggcgcgcccgtccttgtcccgggtgtgatggcggggtg

SEQ ID NO: 1293 - DNA, 221 bp, Artificial Sequence
  source: /note="Description of Artificial Sequence: Synthetic polynucleotide"
acccctctctccagccactaagccagttgctccctcggctgacggctgcacgcgaggcctccgaacgtcttacgccttgtggcgcgcccgtccttgtcccgggtgtgatggcggggtgtggggcggagggcgtggcggggaagggccggcgacgagagccgcgcgggacgactcgtcggcgataaccggtgtcgggtagcgccagccgcgcgacggtaacg

SEQ ID NO: 1294 - DNA, 324 bp, Artificial Sequence
  source: /note="Description of Artificial Sequence: Synthetic polynucleotide"
acccctctctccagccactaagccagttgctccctcggctgacggctgcacgcgaggcctccgaacgtcttacgccttgtggcgcgcccgtccttgtcccgggtgtgatggcggggtgtggggcggagggcgtggcggggaagggccggcgacgagagccgcgcgggacgactcgtcggcgataaccggtgtcgggtagcgccagccgcgcgacggtaacgagggaccgcgacaggcagacgctcccatgatcactctgcacgccgaaggcaaatagtgcaggccgtgcggcgcttggcgttccttggaagggctgaatccccg

SEQ ID NO: 1295 - DNA, 422 bp, Artificial Sequence
  source: /note="Description of Artificial Sequence: Synthetic polynucleotide"
acccctctctccagccactaagccagttgctccctcggctgacggctgcacgcgaggcctccgaacgtcttacgccttgtggcgcgcccgtccttgtcccgggtgtgatggcggggtgtggggcggagggcgtggcggggaagggccggcgacgagagccgcgcgggacgactcgtcggcgataaccggtgtcgggtagcgccagccgcgcgacggtaacgagggaccgcgacaggcagacgctcccatgatcactctgcacgccgaaggcaaatagtgcaggccgtgcggcgcttggcgttccttggaagggctgaatccccgcctcgtccttcgcagcggccccccgggtgttcccatcgccgcttctaggcccactgcgacgcttgcctgcacttcttacacgctctgggtcccagccg

SEQ ID NO: 1296 - protein, 21 aa, Artificial Sequence
  source: /note="Description of Artificial Sequence: Synthetic peptide"
  VARIANT (1)..(3): /replace=" "
  SITE (1)..(21): /note="Variant residues given in the sequence have no preference with respect to those in the annotations for variant positions"
GSGEGRGSLLTCGDVEENPGP

SEQ ID NO: 1297 - protein, 22 aa, Artificial Sequence
  source: /note="Description of Artificial Sequence: Synthetic peptide"
  VARIANT (1)..(3): /replace=" "
  SITE (1)..(22): /note="Variant residues given in the sequence have no preference with respect to those in the annotations for variant positions"
GSGATNFSLLKQAGDVEENPGP

SEQ ID NO: 1298 - protein, 23 aa, Artificial Sequence
  source: /note="Description of Artificial Sequence: Synthetic peptide"
  VARIANT (1)..(3): /replace=" "
  SITE (1)..(23): /note="Variant residues given in the sequence have no preference with respect to those in the annotations for variant positions"
GSGQCTNYALLKLAGDVESNPGP

SEQ ID NO: 1299 - protein, 25 aa, Artificial Sequence
  source: /note="Description of Artificial Sequence: Synthetic peptide"
  VARIANT (1)..(3): /replace=" "
  SITE (1)..(25): /note="Variant residues given in the sequence have no preference with respect to those in the annotations for variant positions"
GSGVKQTLNFDLLKLAGDVESNPGP

SEQ ID NO: 1300 - protein, 486 aa, Artificial Sequence
  source: /note="Description of Artificial Sequence: Synthetic polypeptide"
MALPVTALLLPLALLLHAARPDIQMTQTTSSLSASLGDRVTISCRASQDISKYLNWYQQKPDGTVKLLIYHTSRLHSGVPSRFSGSGSGTDYSLTISNLEQEDIATYFCQQGNTLPYTFGGGTKLEITGGGGSGGGGSGGGGSEVKLQESGPGLVAPSQSLSVTCTVSGVSLPDYGVSWIRQPPRKGLEWLGVIWGSETTYYNSALKSRLTIIKDNSKSQVFLKMNSLQTDDTAIYYCAKHYYYGGSYAMDYWGQGTSVTVSSTTTPAPRPPTPAPTIASQPLSLRPEACRPAAGGAVHTRGLDFACDIYIWAPLAGTCGVLLLSLVITLYCKRGRKKLLYIFKQPFMRPVQTTQEEDGCSCRFPEEEEGGCELRVKFSRSADAPAYKQGQNQLYNELNLGRREEYDVLDKRRGRDPEMGGKPRRKNPQEGLYNELQKDKMAEAYSEIGMKGERRRGKGHDGLYQGLSTATKDTYDALHMQALPPR

SEQ ID NO: 1301 - DNA, 1458 bp, Artificial Sequence
  source: /note="Description of Artificial Sequence: Synthetic polynucleotide"
atggccttaccagtgaccgccttgctcctgccgctggccttgctgctccacgccgccaggccggacatccagatgacacagactacatcctccctgtctgcctctctgggagacagagtcaccatcagttgcagggcaagtcaggacattagtaaatatttaaattggtatcagcagaaaccagatggaactgttaaactcctgatctaccatacatcaagattacactcaggagtcccatcaaggttcagtggcagtgggtctggaacagattattctctcaccattagcaacctggagcaagaagatattgccacttacttttgccaacagggtaatacgcttccgtacacgttcggaggggggaccaagctggagatcacaggtggcggtggctcgggcggtggtgggtcgggtggcggcggatctgaggtgaaactgcaggagtcaggacctggcctggtggcgccctcacagagcctgtccgtcacatgcactgtctcaggggtctcattacccgactatggtgtaagctggattcgccagcctccacgaaagggtctggagtggctgggagtaatatggggtagtgaaaccacatactataattcagctctcaaatccagactgaccatcatcaaggacaactccaagagccaagttttcttaaaaatgaacagtctgcaaactgatgacacagccatttactactgtgccaaacattattactacggtggtagctatgctatggactactggggccaaggaacctcagtcaccgtctcctcaaccacgacgccagcgccgcgaccaccaacaccggcgcccaccatcgcgtcgcagcccctgtccctgcgcccagaggcgtgccggccagcggcggggggcgcagtgcacacgagggggctggacttcgcctgtgatatctacatctgggcgcccttggccgggacttgtggggtccttctcctgtcactggttatcaccctttactgcaaacggggcagaaagaaactcctgtatatattcaaacaaccatttatgagaccagtacaaactactcaagaggaagatggctgtagctgccgatttccagaagaagaagaaggaggatgtgaactgagagtgaagttcagcaggagcgcagacgcccccgcgtacaagcagggccagaaccagctctataacgagctcaatctaggacgaagagaggagtacgatgttttggacaagagacgtggccgggaccctgagatggggggaaagccgagaaggaagaaccctcaggaaggcctgtacaatgaactgcagaaagataagatggcggaggcctacagtgagattgggatgaaaggcgagcgccggaggggcaaggggcacgatggcctttaccagggtctcagtacagccaccaaggacacctacgacgcccttcacatgcaggccctgccccctcgc

SEQ ID NO: 1302 - protein, 242 aa, Artificial Sequence
  source: /note="Description of Artificial Sequence: Synthetic polypeptide"
DIQMTQTTSSLSASLGDRVTISCRASQDISKYLNWYQQKPDGTVKLLIYHTSRLHSGVPSRFSGSGSGTDYSLTISNLEQEDIATYFCQQGNTLPYTFGGGTKLEITGGGGSGGGGSGGGGSEVKLQESGPGLVAPSQSLSVTCTVSGVSLPDYGVSWIRQPPRKGLEWLGVIWGSETTYYNSALKSRLTIIKDNSKSQVFLKMNSLQTDDTAIYYCAKHYYYGGSYAMDYWGQGTSVTVSS

SEQ ID NO: 1303 - protein, 244 aa, Artificial Sequence
  source: /note="Description of Artificial Sequence: Synthetic polypeptide"
QVQLLESGAELVRPGSSVKISCKASGYAFSSYWMNWVKQRPGQGLEWIGQIYPGDGDTNYNGKFKGQATLTADKSSSTAYMQLSGLTSEDSAVYSCARKTISSVVDFYFDYWGQGTTVTGGGSGGGSGGGSGGGSELVLTQSPKFMSTSVGDRVSVTCKASQNVGTNVAWYQQKPGQSPKPLIYSATYRNSGVPDRFTGSGSGTDFTLTITNVQSKDLADYFCQYNRYPYTSFFFTKLEIKRRS

SEQ ID NO: 1304 - protein, 464 aa, Artificial Sequence
  source: /note="Description of Artificial Sequence: Synthetic polypeptide"
QVQLLESGAELVRPGSSVKISCKASGYAFSSYWMNWVKQRPGQGLEWIGQIYPGDGDTNYNGKFKGQATLTADKSSSTAYMQLSGLTSEDSAVYSCARKTISSVVDFYFDYWGQGTTVTGGGSGGGSGGGSGGGSELVLTQSPKFMSTSVGDRVSVTCKASQNVGTNVAWYQQKPGQSPKPLIYSATYRNSGVPDRFTGSGSGTDFTLTITNVQSKDLADYFCQYNRYPYTSFFFTKLEIKRRSKIEVMYPPPYLDNEKSNGTIIHVKGKHLCPSPLFPGPSKPFWVLVVVGGVLACYSLLVTVAFIIFWVRSKRSRLLHSDYMNMTPRRPGPTRKHYQPYAPPRDFAAYRSRVKFSRSADAPAYQQGQNQLYNELNLGRREEYDVLDKRRGRDPEMGGKPRRKNPQEGLYNELQKDKMAEAYSEIGMKGERRRGKGHDGLYQGLSTATKDTYDALHMQALPPR

SEQ ID NO: 1305 - protein, 246 aa, Artificial Sequence
  source: /note="Description of Artificial Sequence: Synthetic polypeptide"
DIQMTQTTSSLSASLGDRVTISCRASQDISKYLNWYQQKPDGTVKLLIYHTSRLHSGVPSRFSGSGSGTDYSLTISNLEQEDIATYFCQQGNTLPYTFGGGTKLEITGSTSGSGKPGSGEGSTKGEVKLQESGPGLVAPSQSLSVTCTVSGVSLPDYGVSWIRQPPRKGLEWLGVIWGSETTYYNSALKSRLTIIKDNSKSQVFLKMNSLQTDDTAIYYCAKHYYYGGSYAMDYWGQGTSVTVSSE

SEQ ID NO: 1306 - protein, 439 aa, Artificial Sequence
  source: /note="Description of Artificial Sequence: Synthetic polypeptide"
DIQMTQTTSSLSASLGDRVTISCRASQDISKYLNWYQQKPDGTVKLLIYHTSRLHSGVPSRFSGSGSGTDYSLTISNLEQEDIATYFCQQGNTLPYTFGGGTKLEITGSTSGSGKPGSGEGSTKGEVKLQESGPGLVAPSQSLSVTCTVSGVSLPDYGVSWIRQPPRKGLEWLGVIWGSETTYYNSALKSRLTIIKDNSKSQVFLKMNSLQTDDTAIYYCAKHYYYGGSYAMDYWGQGTSVTVSSESKYGPPCPPCPMFWVLVVVGGVLACYSLLVTVAFIIFWVKRGRKKLLYIFKQPFMRPVQTTQEEDGCSCRFEEEEGGCELRVKFSRSADAPAYQQGQNQLYNELNLGRREEYDVLDKRRGRDPEMGGKPRRKNPQEGLYNELQKDKMAEAYSEIGMKGERRRGKGHDGLYQGLSTATKDTYDALHMQALPPRL

SEQ ID NO: 1307 - protein, 819 aa, Artificial Sequence
  source: /note="Description of Artificial Sequence: Synthetic polypeptide"
DIQMTQTTSSLSASLGDRVTISCRASQDISKYLNWYQQKPDGTVKLLIYHTSRLHSGVPSRFSGSGSGTDYSLTISNLEQEDIATYFCQQGNTLPYTFGGGTKLEITGSTSGSGKPGSGEGSTKGEVKLQESGPGLVAPSQSLSVTCTVSGVSLPDYGVSWIRQPPRKGLEWLGVIWGSETTYYNSALKSRLTIIKDNSKSQVFLKMNSLQTDDTAIYYCAKHYYYGGSYAMDYWGQGTSVTVSSESKYGPPCPPCPMFWVLVVVGGVLACYSLLVTVAFIIFWVKRGRKKLLYIFKQPFMRPVQTTQEEDGCSCRFEEEEGGCELRVKFSRSADAPAYQQGQNQLYNELNLGRREEYDVLDKRRGRDPEMGGKPRRKNPQEGLYNELQKDKMAEAYSEIGMKGERRRGKGHDGLYQGLSTATKDTYDALHMQALPPRLEGGGEGRGSLLTCGDVEENPGPRMLLLVTSLLLCELPHPAFLLIPRKVCNGIGIGEFKDSLSINATNIKHFKNCTSISGDLHILPVAFRGDSFTHTPPLDPQELDILKTVKEITGFLLIQAWPENRTDLHAFENLEIIRGRTKQHGQFSLAVVSLNITSLGLRSLKEISDGDVIISGNKNLCYANTINWKKLFGTSGQKTKIISNRGENSCKATGQVCHALCSPEGCWGPEPRDCVSCRNVSRGRECVDKCNLLEGEPREFVENSECIQCHPECLPQAMNITCTGRGPDNCIQCAHYIDGPHCVKTCPAGVMGENNTLVWKYADAGHVCHLCHPNCTYGCTGPGLEGCPTNGPKIPSIATGMVGALLLLLVVALGIGLFM

SEQ ID NO: 1308 - protein, 245 aa, Artificial Sequence
  source: /note="Description of Artificial Sequence: Synthetic polypeptide"
DIQMTQTTSSLSASLGDRVTISCRASQDISKYLNWYQQKPDGTVKLLIYHTSRLHSGVPSRFSGSGSGTDYSLTISNLEQEDIATYFCQQGNTLPYTFGGGTKLEITGSTSGSGKPGSGEGSTKGEVKLQESGPGLVAPSQSLSVTCTVSGVSLPDYGVSWIRQPPRKGLEWLGVIWGSETTYYNSALKSRLTIIKDNSKSQVFLKMNSLQTDDTAIYYCAKHYYYGGSYAMDYWGQGTSVTVSS

SEQ ID NO: 1309 - protein, 467 aa, Artificial Sequence
  source: /note="Description of Artificial Sequence: Synthetic polypeptide"
DIQMTQTTSSLSASLGDRVTISCRASQDISKYLNWYQQKPDGTVKLLIYHTSRLHSGVPSRFSGSGSGTDYSLTISNLEQEDIATYFCQQGNTLPYTFGGGTKLEITGSTSGSGKPGSGEGSTKGEVKLQESGPGLVAPSQSLSVTCTVSGVSLPDYGVSWIRQPPRKGLEWLGVIWGSETTYYNSALKSRLTIIKDNSKSQVFLKMNSLQTDDTAIYYCAKHYYYGGSYAMDYWGQGTSVTVSSAAAIEVMYPPPYLDNEKSNGTIIHVKGKHLCPSPLFPGPSKPFWVLVVVGGVLACYSLLVTVAFIIFWVRSKRSRLLHSDYMNMTPRRPGPTRKHYQPYAPPRDFAAYRSRVKFSRSADAPAYQQGQNQLYNELNLGRREEYDVLDKRRGRDPEMGGKPRRKNPQEGLYNELQKDKMAEAYSEIGMKGERRRGKGHDGLYQGLSTATKDTYDALHMQALPPR

SEQ ID NO: 1310 - protein, 119 aa, Artificial Sequence
  source: /note="Description of Artificial Sequence: Synthetic polypeptide"
QVQLLESGAELVRPGSSVKISCKASGYAFSSYWMNWVKQRPGQGLEWIGQIYPGDGDTNYNGKFKGQATLTADKSSSTAYMQLSGLTSEDSAVYSCARKTISSVVDFYFDYWGQGTTVT

SEQ ID NO: 1311 - protein, 111 aa, Artificial Sequence
  source: /note="Description of Artificial Sequence: Synthetic polypeptide"
ELVLTQSPKFMSTSVGDRVSVTCKASQNVGTNVAWYQQKPGQSPKPLIYSATYRNSGVPDRFTGSGSGTDFTLTITNVQSKDLADYFYFCQYNRYPYTSGGGTKLEIKRRS

SEQ ID NO: 1312 - protein, 242 aa, Artificial Sequence
  source: /note="Description of Artificial Sequence: Synthetic polypeptide"
EIVMTQSPATLSLSPGERATLSCRASQDISKYLNWYQQKPGQAPRLLIYHTSRLHSGIPARFSGSGSGTDYTLTISSLQPEDFAVYFCQQGNTLPYTFGQGTKLEIKGGGGSGGGGSGGGGSQVQLQESGPGLVKPSETLSLTCTVSGVSLPDYGVSWIRQPPGKGLEWIGVIWGSETTYYSSSLKSRVTISKDNSKNQVSLKLSSVTAADTAVYYCAKHYYYGGSYAMDYWGQGTLVTVSS

SEQ ID NO: 1313 - protein, 486 aa, Artificial Sequence
  source: /note="Description of Artificial Sequence: Synthetic polypeptide"
MALPVTALLLPLALLLHAARPEIVMTQSPATLSLSPGERATLSCRASQDISKYLNWYQQKPGQAPRLLIYHTSRLHSGIPARFSGSGSGTDYTLTISSLQPEDFAVYFCQQGNTLPYTFGQGTKLEIKGGGGSGGGGSGGGGSQVQLQESGPGLVKPSETLSLTCTVSGVSLPDYGVSWIRQPPGKGLEWIGVIWGSETTYYSSSLKSRVTISKDNSKNQVSLKLSSVTAADTAVYYCAKHYYYGGSYAMDYWGQGTLVTVSSTTTPAPRPPTPAPTIASQPLSLRPEACRPAAGGAVHTRGLDFACDIYIWAPLAGTCGVLLLSLVITLYCKRGRKKLLYIFKQPFMRPVQTTQEEDGCSCRFPEEEEGGCELRVKFSRSADAPAYKQGQNQLYNELNLGRREEYDVLDKRRGRDPEMGGKPRRKNPQEGLYNELQKDKMAEAYSEIGMKGERRRGKGHDGLYQGLSTATKDTYDALHMQALPPR

SEQ ID NO: 1314 - protein, 242 aa, Artificial Sequence
  source: /note="Description of Artificial Sequence: Synthetic polypeptide"
EIVMTQSPATLSLSPGERATLSCRASQDISKYLNWYQQKPGQAPRLLIYHTSRLHSGIPARFSGSGSGTDYTLTISSLQPEDFAVYFCQQGNTLPYTFGQGTKLEIKGGGGSGGGGSGGGGSQVQLQESGPGLVKPSETLSLTCTVSGVSLPDYGVSWIRQPPGKGLEWIGVIWGSETTYYQSSLKSRVTISKDNSKNQVSLKLSSVTAADTAVYYCAKHYYYGGSYAMDYWGQGTLVTVSS

SEQ ID NO: 1315 - DNA, 813 bp, Artificial Sequence
  source: /note="Description of Artificial Sequence: Synthetic polynucleotide"
atggccctccctgtcaccgccctgctgcttccgctggctcttctgctccacgccgctcggcccgaaattgtgatgacccagtcacccgccactcttagcctttcacccggtgagcgcgcaaccctgtcttgcagagcctcccaagacatctcaaaataccttaattggtatcaacagaagcccggacaggctcctcgccttctgatctaccacaccagccggctccattctggaatccctgccaggttcagcggtagcggatctgggaccgactacaccctcactatcagctcactgcagccagaggacttcgctgtctatttctgtcagcaagggaacaccctgccctacacctttggacagggcaccaagctcgagattaaaggtggaggtggcagcggaggaggtgggtccggcggtggaggaagccaggtccaactccaagaaagcggaccgggtcttgtgaagccatcagaaactctttcactgacttgtactgtgagcggagtgtctctccccgattacggggtgtcttggatcagacagccaccggggaagggtctggaatggattggagtgatttggggctctgagactacttactaccaatcatccctcaagtcacgcgtcaccatctcaaaggacaactctaagaatcaggtgtcactgaaactgtcatctgtgaccgcagccgacaccgccgtgtactattgcgctaagcattactattatggcgggagctacgcaatggattactggggacagggtactctggtcaccgtgtccagccaccaccatcatcaccatcaccat

SEQ ID NO: 1316 - protein, 486 aa, Artificial Sequence
  source: /note="Description of Artificial Sequence: Synthetic polypeptide"
MALPVTALLLPLALLLHAARPEIVMTQSPATLSLSPGERATLSCRASQDISKYLNWYQQKPGQAPRLLIYHTSRLHSGIPARFSGSGSGTDYTLTISSLQPEDFAVYFCQQGNTLPYTFGQGTKLEIKGGGGSGGGGSGGGGSQVQLQESGPGLVKPSETLSLTCTVSGVSLPDYGVSWIRQPPGKGLEWIGVIWGSETTYYQSSLKSRVTISKDNSKNQVSLKLSSVTAADTAVYYCAKHYYYGGSYAMDYWGQGTLVTVSSTTTPAPRPPTPAPTIASQPLSLRPEACRPAAGGAVHTRGLDFACDIYIWAPLAGTCGVLLLSLVITLYCKRGRKKLLYIFKQPFMRPVQTTQEEDGCSCRFPEEEEGGCELRVKFSRSADAPAYKQGQNQLYNELNLGRREEYDVLDKRRGRDPEMGGKPRRKNPQEGLYNELQKDKMAEAYSEIGMKGERRRGKGHDGLYQGLSTATKDTYDALHMQALPPR

SEQ ID NO: 1317 - DNA, 1458 bp, Artificial Sequence
  source: /note="Description of Artificial Sequence: Synthetic polynucleotide"
atggccctccctgtcaccgccctgctgcttccgctggctcttctgctccacgccgctcggcccgaaattgtgatgacccagtcacccgccactcttagcctttcacccggtgagcgcgcaaccctgtcttgcagagcctcccaagacatctcaaaataccttaattggtatcaacagaagcccggacaggctcctcgccttctgatctaccacaccagccggctccattctggaatccctgccaggttcagcggtagcggatctgggaccgactacaccctcactatcagctcactgcagccagaggacttcgctgtctatttctgtcagcaagggaacaccctgccctacacctttggacagggcaccaagctcgagattaaaggtggaggtggcagcggaggaggtgggtccggcggtggaggaagccaggtccaactccaagaaagcggaccgggtcttgtgaagccatcagaaactctttcactgacttgtactgtgagcggagtgtctctccccgattacggggtgtcttggatcagacagccaccggggaagggtctggaatggattggagtgatttggggctctgagactacttactaccaatcatccctcaagtcacgcgtcaccatctcaaaggacaactctaagaatcaggtgtcactgaaactgtcatctgtgaccgcagccgacaccgccgtgtactattgcgctaagcattactattatggcgggagctacgcaatggattactggggacagggtactctggtcaccgtgtccagcaccactaccccagcaccgaggccacccaccccggctcctaccatcgcctcccagcctctgtccctgcgtccggaggcatgtagacccgcagctggtggggccgtgcatacccggggtcttgacttcgcctgcgatatctacatttgggcccctctggctggtacttgcggggtcctgctgctttcactcgtgatcactctttactgtaagcgcggtcggaagaagctgctgtacatctttaagcaacccttcatgaggcctgtgcagactactcaagaggaggacggctgttcatgccggttcccagaggaggaggaaggcggctgcgaactgcgcgtgaaattcagccgcagcgcagatgctccagcctacaagcaggggcagaaccagctctacaacgaactcaatcttggtcggagagaggagtacgacgtgctggacaagcggagaggacgggacccagaaatgggcgggaagccgcgcagaaagaatccccaagagggcctgtacaacgagctccaaaaggataagatggcagaagcctatagcgagattggtatgaaaggggaacgcagaagaggcaaaggccacgacggactgtaccagggactcagcaccgccaccaaggacacctatgacgctcttcacatgcaggccctgccgcctcgg

SEQ ID NO: 1318 - protein, 271 aa, Artificial Sequence
  source: /note="Description of Artificial Sequence: Synthetic polypeptide"
MALPVTALLLPLALLLHAARPEIVMTQSPATLSLSPGERATLSCRASQDISKYLNWYQQKPGQAPRLLIYHTSRLHSGIPARFSGSGSGTDYTLTISSLQPEDFAVYFCQQGNTLPYTFGQGTKLEIKGGGGSGGGGSGGGGSQVQLQESGPGLVKPSETLSLTCTVSGVSLPDYGVSWIRQPPGKGLEWIGVIWGSETTYYQSSLKSRVTISKDNSKNQVSLKLSSVTAADTAVYYCAKHYYYGGSYAMDYWGQGTLVTVSSHHHHHHHH

SEQ ID NO: 1319 - protein, 242 aa, Artificial Sequence
  source: /note="Description of Artificial Sequence: Synthetic polypeptide"
QVQLQESGPGLVKPSETLSLTCTVSGVSLPDYGVSWIRQPPGKGLEWIGVIWGSETTYYSSSLKSRVTISKDNSKNQVSLKLSSVTAADTAVYYCAKHYYYGGSYAMDYWGQGTLVTVSSGGGGSGGGGSGGGGSEIVMTQSPATLSLSPGERATLSCRASQDISKYLNWYQQKPGQAPRLLIYHTSRLHSGIPARFSGSGSGTDYTLTISSLQPEDFAVYFCQQGNTLPYTFGQGTKLEIK

SEQ ID NO: 1320 - protein, 486 aa, Artificial Sequence
  source: /note="Description of Artificial Sequence: Synthetic polypeptide"
MALPVTALLLPLALLLHAARPQVQLQESGPGLVKPSETLSLTCTVSGVSLPDYGVSWIRQPPGKGLEWIGVIWGSETTYYSSSLKSRVTISKDNSKNQVSLKLSSVTAADTAVYYCAKHYYYGGSYAMDYWGQGTLVTVSSGGGGSGGGGSGGGGSEIVMTQSPATLSLSPGERATLSCRASQDISKYLNWYQQKPGQAPRLLIYHTSRLHSGIPARFSGSGSGTDYTLTISSLQPEDFAVYFCQQGNTLPYTFGQGTKLEIKTTTPAPRPPTPAPTIASQPLSLRPEACRPAAGGAVHTRGLDFACDIYIWAPLAGTCGVLLLSLVITLYCKRGRKKLLYIFKQPFMRPVQTTQEEDGCSCRFPEEEEGGCELRVKFSRSADAPAYKQGQNQLYNELNLGRREEYDVLDKRRGRDPEMGGKPRRKNPQEGLYNELQKDKMAEAYSEIGMKGERRRGKGHDGLYQGLSTATKDTYDALHMQALPPR

SEQ ID NO: 1321 - protein, 242 aa, Artificial Sequence
  source: /note="Description of Artificial Sequence: Synthetic polypeptide"
QVQLQESGPGLVKPSETLSLTCTVSGVSLPDYGVSWIRQPPGKGLEWIGVIWGSETTYYQSSLKSRVTISKDNSKNQVSLKLSSVTAADTAVYYCAKHYYYGGSYAMDYWGQGTLVTVSSGGGGSGGGGSGGGGSEIVMTQSPATLSLSPGERATLSCRASQDISKYLNWYQQKPGQAPRLLIYHTSRLHSGIPARFSGSGSGTDYTLTISSLQPEDFAVYFCQQGNTLPYTFGQGTKLEIK

SEQ ID NO: 1322 - protein, 486 aa, Artificial Sequence
  source: /note="Description of Artificial Sequence: Synthetic polypeptide"
MALPVTALLLPLALLLHAARPQVQLQESGPGLVKPSETLSLTCTVSGVSLPDYGVSWIRQPPGKGLEWIGVIWGSETTYYQSSLKSRVTISKDNSKNQVSLKLSSVTAADTAVYYCAKHYYYGGSYAMDYWGQGTLVTVSSGGGGSGGGGSGGGGSEIVMTQSPATLSLSPGERATLSCRASQDISKYLNWYQQKPGQAPRLLIYHTSRLHSGIPARFSGSGSGTDYTLTISSLQPEDFAVYFCQQGNTLPYTFGQGTKLEIKTTTPAPRPPTPAPTIASQPLSLRPEACRPAAGGAVHTRGLDFACDIYIWAPLAGTCGVLLLSLVITLYCKRGRKKLLYIFKQPFMRPVQTTQEEDGCSCRFPEEEEGGCELRVKFSRSADAPAYKQGQNQLYNELNLGRREEYDVLDKRRGRDPEMGGKPRRKNPQEGLYNELQKDKMAEAYSEIGMKGERRRGKGHDGLYQGLSTATKDTYDALHMQALPPR

SEQ ID NO: 1323 - protein, 247 aa, Artificial Sequence
  source: /note="Description of Artificial Sequence: Synthetic polypeptide"
EIVMTQSPATLSLSPGERATLSCRASQDISKYLNWYQQKPGQAPRLLIYHTSRLHSGIPARFSGSGSGTDYTLTISSLQPEDFAVYFCQQGNTLPYTFGQGTKLEIKGGGGSGGGGSGGGGSGGGGSQVQLQESGPGLVKPSETLSLTCTVSGVSLPDYGVSWIRQPPGKGLEWIGVIWGSETTYYSSSLKSRVTISKDNSKNQVSLKLSSVTAADTAVYYCAKHYYYGGSYAMDYWGQGTLVTVSS

SEQ ID NO: 1324 - protein, 491 aa, Artificial Sequence
  source: /note="Description of Artificial Sequence: Synthetic polypeptide"
MALPVTALLLPLALLLHAARPEIVMTQSPATLSLSPGERATLSCRASQDISKYLNWYQQKPGQAPRLLIYHTSRLHSGIPARFSGSGSGTDYTLTISSLQPEDFAVYFCQQGNTLPYTFGQGTKLEIKGGGGSGGGGSGGGGSGGGGSQVQLQESGPGLVKPSETLSLTCTVSGVSLPDYGVSWIRQPPGKGLEWIGVIWGSETTYYSSSLKSRVTISKDNSKNQVSLKLSSVTAADTAVYYCAKHYYYGGSYAMDYWGQGTLVTVSSTTTPAPRPPTPAPTIASQPLSLRPEACRPAAGGAVHTRGLDFACDIYIWAPLAGTCGVLLLSLVITLYCKRGRKKLLYIFKQPFMRPVQTTQEEDGCSCRFPEEEEGGCELRVKFSRSADAPAYKQGQNQLYNELNLGRREEYDVLDKRRGRDPEMGGKPRRKNPQEGLYNELQKDKMAEAYSEIGMKGERRRGKGHDGLYQGLSTATKDTYDALHMQALPPR

SEQ ID NO: 1325 - protein, 247 aa, Artificial Sequence
  source: /note="Description of Artificial Sequence: Synthetic polypeptide"
EIVMTQSPATLSLSPGERATLSCRASQDISKYLNWYQQKPGQAPRLLIYHTSRLHSGIPARFSGSGSGTDYTLTISSLQPEDFAVYFCQQGNTLPYTFGQGTKLEIKGGGGSGGGGSGGGGSGGGGSQVQLQESGPGLVKPSETLSLTCTVSGVSLPDYGVSWIRQPPGKGLEWIGVIWGSETTYYQSSLKSRVTISKDNSKNQVSLKLSSVTAADTAVYYCAKHYYYGGSYAMDYWGQGTLVTVSS

SEQ ID NO: 1326 - protein, 491 aa, Artificial Sequence
  source: /note="Description of Artificial Sequence: Synthetic polypeptide"
MALPVTALLLPLALLLHAARPEIVMTQSPATLSLSPGERATLSCRASQDISKYLNWYQQKPGQAPRLLIYHTSRLHSGIPARFSGSGSGTDYTLTISSLQPEDFAVYFCQQGNTLPYTFGQGTKLEIKGGGGSGGGGSGGGGSGGGGSQVQLQESGPGLVKPSETLSLTCTVSGVSLPDYGVSWIRQPPGKGLEWIGVIWGSETTYYQSSLKSRVTISKDNSKNQVSLKLSSVTAADTAVYYCAKHYYYGGSYAMDYWGQGTLVTVSSTTTPAPRPPTPAPTIASQPLSLRPEACRPAAGGAVHTRGLDFACDIYIWAPLAGTCGVLLLSLVITLYCKRGRKKLLYIFKQPFMRPVQTTQEEDGCSCRFPEEEEGGCELRVKFSRSADAPAYKQGQNQLYNELNLGRREEYDVLDKRRGRDPEMGGKPRRKNPQEGLYNELQKDKMAEAYSEIGMKGERRRGKGHDGLYQGLSTATKDTYDALHMQALPPR

SEQ ID NO: 1327 - protein, 247 aa, Artificial Sequence
  source: /note="Description of Artificial Sequence: Synthetic polypeptide"
QVQLQESGPGLVKPSETLSLTCTVSGVSLPDYGVSWIRQPPGKGLEWIGVIWGSETTYYSSSLKSRVTISKDNSKNQVSLKLSSVTAADTAVYYCAKHYYYGGSYAMDYWGQGTLVTVSSGGGGSGGGGSGGGGSGGGGSEIVMTQSPATLSLSPGERATLSCRASQDISKYLNWYQQKPGQAPRLLIYHTSRLHSGIPARFSGSGSGTDYTLTISSLQPEDFAVYFCQQGNTLPYTFGQGTKLEIK

SEQ ID NO: 1328 - protein, 491 aa, Artificial Sequence
  source: /note="Description of Artificial Sequence: Synthetic polypeptide"
MALPVTALLLPLALLLHAARPQVQLQESGPGLVKPSETLSLTCTVSGVSLPDYGVSWIRQPPGKGLEWIGVIWGSETTYYSSSLKSRVTISKDNSKNQVSLKLSSVTAADTAVYYCAKHYYYGGSYAMDYWGQGTLVTVSSGGGGSGGGGSGGGGSGGGGSEIVMTQSPATLSLSPGERATLSCRASQDISKYLNWYQQKPGQAPRLLIYHTSRLHSGIPARFSGSGSGTDYTLTISSLQPEDFAVYFCQQGNTLPYTFGQGTKLEIKTTTPAPRPPTPAPTIASQPLSLRPEACRPAAGGAVHTRGLDFACDIYIWAPLAGTCGVLLLSLVITLYCKRGRKKLLYIFKQPFMRPVQTTQEEDGCSCRFPEEEEGGCELRVKFSRSADAPAYKQGQNQLYNELNLGRREEYDVLDKRRGRDPEMGGKPRRKNPQEGLYNELQKDKMAEAYSEIGMKGERRRGKGHDGLYQGLSTATKDTYDALHMQALPPR

SEQ ID NO: 1329 - protein, 247 aa, Artificial Sequence
  source: /note="Description of Artificial Sequence: Synthetic polypeptide"
QVQLQESGPGLVKPSETLSLTCTVSGVSLPDYGVSWIRQPPGKGLEWIGVIWGSETTYYQSSLKSRVTISKDNSKNQVSLKLSSVTAADTAVYYCAKHYYYGGSYAMDYWGQGTLVTVSSGGGGSGGGGSGGGGSGGGGSEIVMTQSPATLSLSPGERATLSCRASQDISKYLNWYQQKPGQAPRLLIYHTSRLHSGIPARFSGSGSGTDYTLTISSLQPEDFAVYFCQQGNTLPYTFGQGTKLEIK

SEQ ID NO: 1330 - protein, 491 aa, Artificial Sequence
  source: /note="Description of Artificial Sequence: Synthetic polypeptide"
MALPVTALLLPLALLLHAARPQVQLQESGPGLVKPSETLSLTCTVSGVSLPDYGVSWIRQPPGKGLEWIGVIWGSETTYYQSSLKSRVTISKDNSKNQVSLKLSSVTAADTAVYYCAKHYYYGGSYAMDYWGQGTLVTVSSGGGGSGGGGSGGGGSGGGGSEIVMTQSPATLSLSPGERATLSCRASQDISKYLNWYQQKPGQAPRLLIYHTSRLHSGIPARFSGSGSGTDYTLTISSLQPEDFAVYFCQQGNTLPYTFGQGTKLEIKTTTPAPRPPTPAPTIASQPLSLRPEACRPAAGGAVHTRGLDFACDIYIWAPLAGTCGVLLLSLVITLYCKRGRKKLLYIFKQPFMRPVQTTQEEDGCSCRFPEEEEGGCELRVKFSRSADAPAYKQGQNQLYNELNLGRREEYDVLDKRRGRDPEMGGKPRRKNPQEGLYNELQKDKMAEAYSEIGMKGERRRGKGHDGLYQGLSTATKDTYDALHMQALPPR

SEQ ID NO: 1331 - protein, 247 aa, Artificial Sequence
  source: /note="Description of Artificial Sequence: Synthetic polypeptide"
EIVMTQSPATLSLSPGERATLSCRASQDISKYLNWYQQKPGQAPRLLIYHTSRLHSGIPARFSGSGSGTDYTLTISSLQPEDFAVYFCQQGNTLPYTFGQGTKLEIKGGGGSGGGGSGGGGSGGGGSQVQLQESGPGLVKPSETLSLTCTVSGVSLPDYGVSWIRQPPGKGLEWIGVIWGSETTYYNSSLKSRVTISKDNSKNQVSLKLSSVTAADTAVYYCAKHYYYGGSYAMDYWGQGTLVTVSS

SEQ ID NO: 1332 - protein, 491 aa, Artificial Sequence
  source: /note="Description of Artificial Sequence: Synthetic polypeptide"
MALPVTALLLPLALLLHAARPEIVMTQSPATLSLSPGERATLSCRASQDISKYLNWYQQKPGQAPRLLIYHTSRLHSGIPARFSGSGSGTDYTLTISSLQPEDFAVYFCQQGNTLPYTFGQGTKLEIKGGGGSGGGGSGGGGSGGGGSQVQLQESGPGLVKPSETLSLTCTVSGVSLPDYGVSWIRQPPGKGLEWIGVIWGSETTYYNSSLKSRVTISKDNSKNQVSLKLSSVTAADTAVYYCAKHYYYGGSYAMDYWGQGTLVTVSSTTTPAPRPPTPAPTIASQPLSLRPEACRPAAGGAVHTRGLDFACDIYIWAPLAGTCGVLLLSLVITLYCKRGRKKLLYIFKQPFMRPVQTTQEEDGCSCRFPEEEEGGCELRVKFSRSADAPAYKQGQNQLYNELNLGRREEYDVLDKRRGRDPEMGGKPRRKNPQEGLYNELQKDKMAEAYSEIGMKGERRRGKGHDGLYQGLSTATKDTYDALHMQALPPR

SEQ ID NO: 1333 - protein, 247 aa, Artificial Sequence
  source: /note="Description of Artificial Sequence: Synthetic polypeptide"
QVQLQESGPGLVKPSETLSLTCTVSGVSLPDYGVSWIRQPPGKGLEWIGVIWGSETTYYNSSLKSRVTISKDNSKNQVSLKLSSVTAADTAVYYCAKHYYYGGSYAMDYWGQGTLVTVSSGGGGSGGGGSGGGGSGGGGSEIVMTQSPATLSLSPGERATLSCRASQDISKYLNWYQQKPGQAPRLLIYHTSRLHSGIPARFSGSGSGTDYTLTISSLQPEDFAVYFCQQGNTLPYTFGQGTKLEIK

SEQ ID NO: 1334 - protein, 491 aa, Artificial Sequence; identical to SEQ ID NO: 1332
  source: /note="Description of Artificial Sequence: Synthetic polypeptide"

SEQ ID NO: 1335 - protein, 242 aa, Artificial Sequence
  source: /note="Description of Artificial Sequence: Synthetic polypeptide"
EIVMTQSPATLSLSPGERATLSCRASQDISKYLNWYQQKPGQAPRLLIYHTSRLHSGIPARFSGSGSGTDYTLTISSLQPEDFAVYFCQQGNTLPYTFGQGTKLEIKGGGGSGGGGSGGGGSQVQLQESGPGLVKPSETLSLTCTVSGVSLPDYGVSWIRQPPGKGLEWIGVIWGSETTYYNSSLKSRVTISKDNSKNQVSLKLSSVTAADTAVYYCAKHYYYGGSYAMDYWGQGTLVTVSS

SEQ ID NO: 1336 - protein, 491 aa, Artificial Sequence
  source: /note="Description of Artificial Sequence: Synthetic polypeptide"
MALPVTALLLPLALLLHAARPQVQLQESGPGLVKPSETLSLTCTVSGVSLPDYGVSWIRQPPGKGLEWIGVIWGSETTYYNSSLKSRVTISKDNSKNQVSLKLSSVTAADTAVYYCAKHYYYGGSYAMDYWGQGTLVTVSSGGGGSGGGGSGGGGSGGGGSEIVMTQSPATLSLSPGERATLSCRASQDISKYLNWYQQKPGQAPRLLIYHTSRLHSGIPARFSGSGSGTDYTLTISSLQPEDFAVYFCQQGNTLPYTFGQGTKLEIKTTTPAPRPPTPAPTIASQPLSLRPEACRPAAGGAVHTRGLDFACDIYIWAPLAGTCGVLLLSLVITLYCKRGRKKLLYIFKQPFMRPVQTTQEEDGCSCRFPEEEEGGCELRVKFSRSADAPAYKQGQNQLYNELNLGRREEYDVLDKRRGRDPEMGGKPRRKNPQEGLYNELQKDKMAEAYSEIGMKGERRRGKGHDGLYQGLSTATKDTYDALHMQALPPR

SEQ ID NO: 1337 - protein, 242 aa, Artificial Sequence
  source: /note="Description of Artificial Sequence: Synthetic polypeptide"
QVQLQESGPGLVKPSETLSLTCTVSGVSLPDYGVSWIRQPPGKGLEWIGVIWGSETTYYNSSLKSRVTISKDNSKNQVSLKLSSVTAADTAVYYCAKHYYYGGSYAMDYWGQGTLVTVSSGGGGSGGGGSGGGGSEIVMTQSPATLSLSPGERATLSCRASQDISKYLNWYQQKPGQAPRLLIYHTSRLHSGIPARFSGSGSGTDYTLTISSLQPEDFAVYFCQQGNTLPYTFGQGTKLEIK

SEQ ID NO: 1338 - protein, 486 aa, Artificial Sequence
  source: /note="Description of Artificial Sequence: Synthetic polypeptide"
MALPVTALLLPLALLLHAARPEIVMTQSPATLSLSPGERATLSCRASQDISKYLNWYQQKPGQAPRLLIYHTSRLHSGIPARFSGSGSGTDYTLTISSLQPEDFAVYFCQQGNTLPYTFGQGTKLEIKGGGGSGGGGSGGGGSQVQLQESGPGLVKPSETLSLTCTVSGVSLPDYGVSWIRQPPGKGLEWIGVIWGSETTYYNSSLKSRVTISKDNSKNQVSLKLSSVTAADTAVYYCAKHYYYGGSYAMDYWGQGTLVTVSSTTTPAPRPPTPAPTIASQPLSLRPEACRPAAGGAVHTRGLDFACDIYIWAPLAGTCGVLLLSLVITLYCKRGRKKLLYIFKQPFMRPVQTTQEEDGCSCRFPEEEEGGCELRVKFSRSADAPAYKQGQNQLYNELNLGRREEYDVLDKRRGRDPEMGGKPRRKNPQEGLYNELQKDKMAEAYSEIGMKGERRRGKGHDGLYQGLSTATKDTYDALHMQALPPR

SEQ ID NO: 1339 - protein, 5 aa, Artificial Sequence
  source: /note="Description of Artificial Sequence: Synthetic peptide"
DYGVS

SEQ ID NO: 1340 - protein, 16 aa, Artificial Sequence
  source: /note="Description of Artificial Sequence: Synthetic peptide"
VIWGSETTYYNSALKS

SEQ ID NO: 1341 - protein, 12 aa, Artificial Sequence
  source: /note="Description of Artificial Sequence: Synthetic peptide"
HYYYGGSYAMDY

SEQ ID NO: 1342 - protein, 11 aa, Artificial Sequence
  source: /note="Description of Artificial Sequence: Synthetic peptide"
RASQDISKYLN

SEQ ID NO: 1343 - protein, 7 aa, Artificial Sequence
  source: /note="Description of Artificial Sequence: Synthetic peptide"
HTSRLHS

SEQ ID NO: 1344 - protein, 9 aa, Artificial Sequence
  source: /note="Description of Artificial Sequence: Synthetic peptide"
QQGNTLPYT

SEQ ID NO: 1345 - protein, 5 aa, Artificial Sequence
  source: /note="Description of Artificial Sequence: Synthetic peptide"
DYGVS

SEQ ID NO: 1346 - protein, 16 aa, Artificial Sequence
  source: /note="Description of Artificial Sequence: Synthetic peptide"
VIWGSETTYYSSSLKS

SEQ ID NO: 1347 - protein, 12 aa, Artificial Sequence
  source: /note="Description of Artificial Sequence: Synthetic peptide"
HYYYGGSYAMDY

SEQ ID NO: 1348 - protein, 11 aa, Artificial Sequence
  source: /note="Description of Artificial Sequence: Synthetic peptide"
RASQDISKYLN

SEQ ID NO: 1349 - protein, 7 aa, Artificial Sequence
  source: /note="Description of Artificial Sequence: Synthetic peptide"
HTSRLHS

SEQ ID NO: 1350 - protein, 9 aa, Artificial Sequence
  source: /note="Description of Artificial Sequence: Synthetic peptide"
QQGNTLPYT

SEQ ID NO: 1351 - protein, 5 aa, Artificial Sequence
  source: /note="Description of Artificial Sequence: Synthetic peptide"
DYGVS

SEQ ID NO: 1352 - protein, 16 aa, Artificial Sequence
  source: /note="Description of Artificial Sequence: Synthetic peptide"
VIWGSETTYYQSSLKS

SEQ ID NO: 1353 - protein, 12 aa, Artificial Sequence
  source: /note="Description of Artificial Sequence: Synthetic peptide"
HYYYGGSYAMDY

SEQ ID NO: 1354 - protein, 11 aa, Artificial Sequence
  source: /note="Description of Artificial Sequence: Synthetic peptide"
RASQDISKYLN

SEQ ID NO: 1355 - protein, 7 aa, Artificial Sequence
  source: /note="Description of Artificial Sequence: Synthetic peptide"
HTSRLHS

SEQ ID NO: 1356 - protein, 9 aa, Artificial Sequence
  source: /note="Description of Artificial Sequence: Synthetic peptide"
QQGNTLPYT

SEQ ID NO: 1357 - protein, 5 aa, Artificial Sequence
  source: /note="Description of Artificial Sequence: Synthetic peptide"
DYGVS

SEQ ID NO: 1358 - protein, 16 aa, Artificial Sequence
  source: /note="Description of Artificial Sequence: Synthetic peptide"
VIWGSETTYYNSSLKS

SEQ ID NO: 1359 - protein, 12 aa, Artificial Sequence
  source: /note="Description of Artificial Sequence: Synthetic peptide"
HYYYGGSYAMDY

SEQ ID NO: 1360 - protein, 11 aa, Artificial Sequence
  source: /note="Description of Artificial Sequence: Synthetic peptide"
RASQDISKYLN

SEQ ID NO: 1361 - protein, 7 aa, Artificial Sequence
  source: /note="Description of Artificial Sequence: Synthetic peptide"
HTSRLHS

SEQ ID NO: 1362 - protein, 9 aa, Artificial Sequence
  source: /note="Description of Artificial Sequence: Synthetic peptide"
QQGNTLPYT

SEQ ID NO: 1363 - protein, 5 aa, Artificial Sequence
  source: /note="Description of Artificial Sequence: Synthetic peptide"
NYNLH

SEQ ID NO: 1364 - protein, 17 aa, Artificial Sequence
  source: /note="Description of Artificial Sequence: Synthetic peptide"
AIYPGNYDTSYNQKFKG

SEQ ID NO: 1365 - protein, 13 aa, Artificial Sequence
  source: /note="Description of Artificial Sequence: Synthetic peptide"
VDFGHSRYWYFDV

SEQ ID NO: 1366 - protein, 7 aa, Artificial Sequence
  source: /note="Description of Artificial Sequence: Synthetic peptide"
GYTFTNY

SEQ ID NO: 1367 - protein, 6 aa, Artificial Sequence
  source: /note="Description of Artificial Sequence: Synthetic peptide"
YPGNYD

SEQ ID NO: 1368 - protein, 13 aa, Artificial Sequence
  source: /note="Description of Artificial Sequence: Synthetic peptide"
VDFGHSRYWYFDV

SEQ ID NO: 1369 - protein, 8 aa, Artificial Sequence
  source: /note="Description of Artificial Sequence: Synthetic peptide"
GYTFTNYN

SEQ ID NO: 1370 - protein, 8 aa, Artificial Sequence
  source: /note="Description of Artificial Sequence: Synthetic peptide"
IYPGNYDT

SEQ ID NO: 1371 - protein, 15 aa, Artificial Sequence
  source: /note="Description of Artificial Sequence: Synthetic peptide"
ARVDFGHSRYWYFDV

SEQ ID NO: 1372 - protein, 10 aa, Artificial Sequence
  source: /note="Description of Artificial Sequence: Synthetic peptide"
GYTFTNYNLH

SEQ ID NO: 1373 - protein, 17 aa, Artificial Sequence
  source: /note="Description of Artificial Sequence: Synthetic peptide"
AIYPGNYDTSYNQKFKG

SEQ ID NO: 1374 - protein, 13 aa, Artificial Sequence
  source: /note="Description of Artificial Sequence: Synthetic peptide"
VDFGHSRYWYFDV

SEQ ID NO: 1375 - protein, 122 aa, Artificial Sequence
  source: /note="Description of Artificial Sequence: Synthetic polypeptide"
QVQLVQSGAEVKKPGASVKVSCKASGYTFTNYNLHWVRQAPGQGLEWMGAIYPGNYDTSYNQKFKGRVTMTADKSTSTAYMELSSLRSEDTAVYYCARVDFGHSRYWYFDVWGQGTTVTVSS

SEQ ID NO: 1376 - DNA, 366 bp, Artificial Sequence
  source: /note="Description of Artificial Sequence: Synthetic polynucleotide"
caagtccaactcgtccagtccggtgcagaagtcaagaaacctggagcatccgtgaaagtgtcttgcaaagcctccggctacaccttcaccaactacaacctccattgggtcagacaggcccccggacaaggactcgaatggatgggagcgatctacccgggaaactacgacaccagctacaaccagaagttcaagggccgcgtgactatgaccgccgataagagcacctccaccgcctacatggaactgtcctcgctgaggtccgaggacactgcggtgtactactgcgcccgcgtggacttcggacactcacggtattggtacttcgacgtctggggacagggcactaccgtgaccgtgtcgagc

SEQ ID NO: 1377 - protein, 10 aa, Artificial Sequence
  source: /note="Description of Artificial Sequence: Synthetic peptide"
RATSSVSSMN

SEQ ID NO: 1378 - protein, 7 aa, Artificial Sequence
  source: /note="Description of Artificial Sequence: Synthetic peptide"
ATSNLAS

SEQ ID NO: 1379 - protein, 9 aa, Artificial Sequence
  source: /note="Description of Artificial Sequence: Synthetic peptide"
QQWTFNPPT

SEQ ID NO: 1380 - protein, 6 aa, Artificial Sequence
  source: /note="Description of Artificial Sequence: Synthetic peptide"
TSSVSS

SEQ ID NO: 1381 - protein, 3 aa, Artificial Sequence
  source: /note="Description of Artificial Sequence: Synthetic peptide"
ATS

SEQ ID NO: 1382 - protein, 6 aa, Artificial Sequence
  source: /note="Description of Artificial Sequence: Synthetic peptide"
WTFNPP

SEQ ID NO: 1383 - protein, 5 aa, Artificial Sequence
  source: /note="Description of Artificial Sequence: Synthetic peptide"
SSVSS

SEQ ID NO: 1384 - protein, 3 aa, Artificial Sequence
  source: /note="Description of Artificial Sequence: Synthetic peptide"
ATS

SEQ ID NO: 1385 - protein, 9 aa, Artificial Sequence
  source: /note="Description of Artificial Sequence: Synthetic peptide"
QQWTFNPPT

SEQ ID NO: 1386 - protein, 10 aa, Artificial Sequence
  source: /note="Description of Artificial Sequence: Synthetic peptide"
RATSSVSSMN

SEQ ID NO: 1387 - protein, 7 aa, Artificial Sequence
  source: /note="Description of Artificial Sequence: Synthetic peptide"
ATSNLAS

SEQ ID NO: 1388 - protein, 9 aa, Artificial Sequence
  source: /note="Description of Artificial Sequence: Synthetic peptide"
QQWTFNPPT

SEQ ID NO: 1389 - protein, 106 aa, Artificial Sequence
  source: /note="Description of Artificial Sequence: Synthetic polypeptide"
DIQLTQSPSFLSASVGDRVTITCRATSSVSSMNWYQQKPGKAPKPLIHATSNLASGVPSRFSGSGSGTEYTLTISSLQPEDFATYYCQQWTFNPPTFGQGTKLEIK

SEQ ID NO: 1390 - DNA, 318 bp, Artificial Sequence
  source: /note="Description of Artificial Sequence: Synthetic polynucleotide"
gatatccagctgactcagtccccgtcattcctgtccgcctccgtgggagacagagtgaccatcacctgtcgggccacttcctccgtgtcaagcatgaactggtatcagcagaagcccgggaaggccccaaagccgctgattcacgcgacgtccaacctggcttccggcgtgccgagccggttctccggctcggggagcgggactgagtacaccctgactatttcctcgcttcaacccgaggactttgctacctactactgccaacagtggaccttcaatcctccgacattcggacagggtaccaagttggaaatcaag

SEQ ID NO: 1391 - protein, 20 aa, Artificial Sequence
  source: /note="Description of Artificial Sequence: Synthetic peptide"
GGGGSGGGGSGGGGSGGGGS

SEQ ID NO: 1392 - protein, 248 aa, Artificial Sequence
  source: /note="Description of Artificial Sequence: Synthetic polypeptide"
QVQLVQSGAEVKKPGASVKVSCKASGYTFTNYNLHWVRQAPGQGLEWMGAIYPGNYDTSYNQKFKGRVTMTADKSTSTAYMELSSLRSEDTAVYYCARVDFGHSRYWYFDVWGQGTTVTVSSGGGGSGGGGSGGGGSGGGGSDIQLTQSPSFLSASVGDRVTITCRATSSVSSMNWYQQKPGKAPKPLIHATSNLASGVPSRFSGSGSGTEYTLTISSLQPEDFATYYCQQWTFNPPTFGQGTKLEIK

SEQ ID NO: 1393 - DNA, 744 bp, Artificial Sequence
  source: /note="Description of Artificial Sequence: Synthetic polynucleotide"
caagtccaactcgtccagtccggtgcagaagtcaagaaacctggagcatccgtgaaagtgtcttgcaaagcctccggctacaccttcaccaactacaacctccattgggtcagacaggcccccggacaaggactcgaatggatgggagcgatctacccgggaaactacgacaccagctacaaccagaagttcaagggccgcgtgactatgaccgccgataagagcacctccaccgcctacatggaactgtcctcgctgaggtccgaggacactgcggtgtactactgcgcccgcgtggacttcggacactcacggtattggtacttcgacgtctggggacagggcactaccgtgaccgtgtcgagcggcggaggaggttcgggagggggcggatcagggggcggcggcagcggtggagggggctcggatatccagctgactcagtccccgtcattcctgtccgcctccgtgggagacagagtgaccatcacctgtcgggccacttcctccgtgtcaagcatgaactggtatcagcagaagcccgggaaggccccaaagccgctgattcacgcgacgtccaacctggcttccggcgtgccgagccggttctccggctcggggagcgggactgagtacaccctgactatttcctcgcttcaacccgaggactttgctacctactactgccaacagtggaccttcaatcctccgacattcggacagggtaccaagttggaaatcaag

SEQ ID NO: 1394 - protein, 492 aa, Artificial Sequence
  source: /note="Description of Artificial Sequence: Synthetic polypeptide"
MALPVTALLLPLALLLHAARPQVQLVQSGAEVKKPGASVKVSCKASGYTFTNYNLHWVRQAPGQGLEWMGAIYPGNYDTSYNQKFKGRVTMTADKSTSTAYMELSSLRSEDTAVYYCARVDFGHSRYWYFDVWGQGTTVTVSSGGGGSGGGGSGGGGSGGGGSDIQLTQSPSFLSASVGDRVTITCRATSSVSSMNWYQQKPGKAPKPLIHATSNLASGVPSRFSGSGSGTEYTLTISSLQPEDFATYYCQQWTFNPPTFGQGTKLEIKTTTPAPRPPTPAPTIASQPLSLRPEACRPAAGGAVHTRGLDFACDIYIWAPLAGTCGVLLLSLVITLYCKRGRKKLLYIFKQPFMRPVQTTQEEDGCSCRFPEEEEGGCELRVKFSRSADAPAYQQGQNQLYNELNLGRREEYDVLDKRRGRDPEMGGKPRRKNPQEGLYNELQKDKMAEAYSEIGMKGERRRGKGHDGLYQGLSTATKDTYDALHMQALPPR

SEQ ID NO: 1395 - DNA, 1476 bp, Artificial Sequence
  source: /note="Description of Artificial Sequence: Synthetic polynucleotide"
atggccctccctgtcaccgccctgctgcttccgctggctcttctgctccacgccgctcggccccaagtccaactcgtccagtccggtgcagaagtcaagaaacctggagcatccgtgaaagtgtcttgcaaagcctccggctacaccttcaccaactacaacctccattgggtcagacaggcccccggacaaggactcgaatggatgggagcgatctacccgggaaactacgacaccagctacaaccagaagttcaagggccgcgtgactatgaccgccgataagagcacctccaccgcctacatggaactgtcctcgctgaggtccgaggacactgcggtgtactactgcgcccgcgtggacttcggacactcacggtattggtacttcgacgtctggggacagggcactaccgtgaccgtgtcgagcggcggaggaggttcgggagggggcggatcagggggcggcggcagcggtggagggggctcggatatccagctgactcagtccccgtcattcctgtccgcctccgtgggagacagagtgaccatcacctgtcgggccacttcctccgtgtcaagcatgaactggtatcagcagaagcccgggaaggccccaaagccgctgattcacgcgacgtccaacctggcttccggcgtgccgagccggttctccggctcggggagcgggactgagtacaccctgactatttcctcgcttcaacccgaggactttgctacctactactgccaacagtggaccttcaatcctccgacattcggacagggtaccaagttggaaatcaagaccactaccccagcaccgaggccacccaccccggctcctaccatcgcctcccagcctctgtccctgcgtccggaggcatgtagacccgcagctggtggggccgtgcatacccggggtcttgacttcgcctgcgatatctacatttgggcccctctggctggtacttgcggggtcctgctgctttcactcgtgatcactctttactgtaagcgcggtcggaagaagctgctgtacatctttaagcaacccttcatgaggcctgtgcagactactcaagaggaggacggctgttcatgccggttcccagaggaggaggaaggcggctgcgaactgcgcgtgaaattcagccgcagcgcagatgctccagcctaccagcaggggcagaaccagctctacaacgaactcaatcttggtcggagagaggagtacgacgtgctggacaagcggagaggacgggacccagaaatgggcgggaagccgcgcagaaagaatccccaagagggcctgtacaacgagctccaaaaggataagatggcagaagcctatagcgagattggtatgaaaggggaacgcagaagaggcaaaggccacgacggactgtaccagggactcagcaccgccaccaaggacacctatgacgctcttcacatgcaggccctgccgcctcgg

SEQ ID NO: 1396 - protein, 5 aa, Artificial Sequence
  source: /note="Description of Artificial Sequence: Synthetic peptide"
SYNMH

SEQ ID NO: 1397 - protein, 17 aa, Artificial Sequence
  source: /note="Description of Artificial Sequence: Synthetic peptide"
AIYPGNGDTSYNPKFKG

SEQ ID NO: 1398 - protein, 13 aa, Artificial Sequence
  source: /note="Description of Artificial Sequence: Synthetic peptide"
SYFYGSSSWYFDV

SEQ ID NO: 1399 - protein, 7 aa, Artificial Sequence
  source: /note="Description of Artificial Sequence: Synthetic peptide"
GYTFTSY

SEQ ID NO: 1400 - protein, 6 aa, Artificial Sequence
  source: /note="Description of Artificial Sequence: Synthetic peptide"
YPGNGD

SEQ ID NO: 1401 - protein, 13 aa, Artificial Sequence
  source: /note="Description of Artificial Sequence: Synthetic peptide"
SYFYGSSSWYFDV

SEQ ID NO: 1402 - protein, 8 aa, Artificial Sequence
  source: /note="Description of Artificial Sequence: Synthetic peptide"
GYTFTSYN

SEQ ID NO: 1403 - protein, 8 aa, Artificial Sequence
  source: /note="Description of Artificial Sequence: Synthetic peptide"
IYPGNGDT

SEQ ID NO: 1404 - protein, 15 aa, Artificial Sequence
  source: /note="Description of Artificial Sequence: Synthetic peptide"
ARSYFYGSSSWYFDV

SEQ ID NO: 1405 - protein, 10 aa, Artificial Sequence
  source: /note="Description of Artificial Sequence: Synthetic peptide"
GYTFTSYNMH

SEQ ID NO: 1406 - protein, 17 aa, Artificial Sequence
  source: /note="Description of Artificial Sequence: Synthetic peptide"
AIYPGNGDTSYNPKFKG

SEQ ID NO: 1407 - protein, 13 aa, Artificial Sequence
  source: /note="Description of Artificial Sequence: Synthetic peptide"
SYFYGSSSWYFDV

SEQ ID NO: 1408 - protein, 122 aa, Artificial Sequence
  source: /note="Description of Artificial Sequence: Synthetic polypeptide"
QVQLVQSGAEVKKPGASVKVSCKASGYTFTSYNMHWVRQAPGQGLEWMGAIYPGNGDTSYNPKFKGRVTMTADKSTRTAYMELSSLRSEDTAVYYCARSYFYGSSSWYFDVWGQGTTVTVSS

SEQ ID NO: 1409 - DNA, 366 bp, Artificial Sequence
  source: /note="Description of Artificial Sequence: Synthetic polynucleotide"
caagtgcagctcgtccagtccggtgcagaagtcaagaaacccggtgcttcagtgaaagtgtcctgcaaggcctccggttacaccttcacctcctacaacatgcactgggtccgccaagccccgggccagggactcgaatggatgggagccatctaccctggcaacggggacacctcatacaaccctaagttcaagggcagagtgaccatgactgcggacaagtccactagaacagcgtacatggagctgagcagcctgcggtccgaggatactgccgtgtactactgcgcccgctcctacttctacggaagctcgtcgtggtacttcgatgtctggggacagggcaccactgtgactgtgtcctcc

SEQ ID NO: 1410 - protein, 10 aa, Artificial Sequence
  source: /note="Description of Artificial Sequence: Synthetic peptide"
RASSSVSSMH

SEQ ID NO: 1411 - protein, 7 aa, Artificial Sequence
  source: /note="Description of Artificial Sequence: Synthetic peptide"
ATSNLAS

SEQ ID NO: 1412 - protein, 9 aa, Artificial Sequence
  source: /note="Description of Artificial Sequence: Synthetic peptide"
QQWIFNPPT

SEQ ID NO: 1413 - protein, 6 aa, Artificial Sequence
  source: /note="Description of Artificial Sequence: Synthetic peptide"
SSSVSS

SEQ ID NO: 1414 - protein, 3 aa, Artificial Sequence
  source: /note="Description of Artificial Sequence: Synthetic peptide"
ATS

SEQ ID NO: 1415 - protein, 6 aa, Artificial Sequence
  source: /note="Description of Artificial Sequence: Synthetic peptide"
WIFNPP

SEQ ID NO: 1416 - protein, 5 aa, Artificial Sequence
  source: /note="Description of Artificial Sequence: Synthetic peptide"
SSVSS

SEQ ID NO: 1417 - protein, 3 aa, Artificial Sequence
  source: /note="Description of Artificial Sequence: Synthetic peptide"
ATS

SEQ ID NO: 1418 - protein, 9 aa, Artificial Sequence
  source: /note="Description of Artificial Sequence: Synthetic peptide"
QQWIFNPPT

SEQ ID NO: 1419 - protein, 10 aa, Artificial Sequence
  source: /note="Description of Artificial Sequence: Synthetic peptide"
RASSSVSSMH

SEQ ID NO: 1420 - protein, 7 aa, Artificial Sequence
  source: /note="Description of Artificial Sequence: Synthetic peptide"
ATSNLAS

SEQ ID NO: 1421 - protein, 9 aa, Artificial Sequence
  source: /note="Description of Artificial Sequence: Synthetic peptide"
QQWIFNPPT

SEQ ID NO: 1422 - protein, 106 aa, Artificial Sequence
  source: /note="Description of Artificial Sequence: Synthetic polypeptide"
EIVLTQSPATLSLSPGERATLSCRASSSVSSMHWYQQKPGQAPRPLIFATSNLASGIPARFSGSGSGTDYTLTISSLEPEDAAVYYCQQWIFNPPTFGGGTKVEIK

SEQ ID NO: 1423 - DNA, 318 bp, Artificial Sequence
  source: /note="Description of Artificial Sequence: Synthetic polynucleotide"
gaaattgtgctgactcagagccccgccaccctgagcttgtcccccggggaaagggcaacgctgtcatgccgcgcctcgtcatccgtgtcctccatgcattggtaccagcagaagccgggacaggcccctcggccgctgatcttcgccacctccaatctcgcttccggcattccggcccggttctcgggaagcgggtcggggaccgactataccctgaccatctctagccttgaacctgaggacgccgcggtgtactattgtcaacagtggatctttaaccccccaaccttcggtggaggcaccaaagtggagattaag

SEQ ID NO: 1424 - protein, 20 aa, Artificial Sequence
  source: /note="Description of Artificial Sequence: Synthetic peptide"
GGGGSGGGGSGGGGSGGGGS

SEQ ID NO: 1425 - protein, 248 aa, Artificial Sequence
  source: /note="Description of Artificial Sequence: Synthetic polypeptide"
QVQLVQSGAEVKKPGASVKVSCKASGYTFTSYNMHWVRQAPGQGLEWMGAIYPGNGDTSYNPKFKGRVTMTADKSTRTAYMELSSLRSEDTAVYYCARSYFYGSSSWYFDVWGQGTTVTVSSGGGGSGGGGSGGGGSGGGGSEIVLTQSPATLSLSPGERATLSCRASSSVSSMHWYQQKPGQAPRPLIFATSNLASGIPARFSGSGSGTDYTLTISSLEPEDAAVYYCQQWIFNPPTFGGGTKVEIK

SEQ ID NO: 1426 - DNA, 744 bp, Artificial Sequence
  source: /note="Description of Artificial Sequence: Synthetic polynucleotide"
caagtgcagctcgtccagtccggtgcagaagtcaagaaacccggtgcttcagtgaaagtgtcctgcaaggcctccggttacaccttcacctcctacaacatgcactgggtccgccaagccccgggccagggactcgaatggatgggagccatctaccctggcaacggggacacctcatacaaccctaagttcaagggcagagtgaccatgactgcggacaagtccactagaacagcgtacatggagctgagcagcctgcggtccgaggatactgccgtgtactactgcgcccgctcctacttctacggaagctcgtcgtggtacttcgatgtctggggacagggcaccactgtgactgtgtcctccggtggcggaggctcgggcggaggcggaagcggcggcgggggatcgggaggaggagggtccgaaattgtgctgactcagagccccgccaccctgagcttgtcccccggggaaagggcaacgctgtcatgccgcgcctcgtcatccgtgtcctccatgcattggtaccagcagaagccgggacaggcccctcggccgctgatcttcgccacctccaatctcgcttccggcattccggcccggttctcgggaagcgggtcggggaccgactataccctgaccatctctagccttgaacctgaggacgccgcggtgtactattgtcaacagtggatctttaaccccccaaccttcggtggaggcaccaaagtggagattaag

SEQ ID NO: 1427 - protein, 492 aa, Artificial Sequence
  source: /note="Description of Artificial Sequence: Synthetic polypeptide"
MALPVTALLLPLALLLHAARPQVQLVQSGAEVKKPGASVKVSCKASGYTFTSYNMHWVRQAPGQGLEWMGAIYPGNGDTSYNPKFKGRVTMTADKSTRTAYMELSSLRSEDTAVYYCARSYFYGSSSWYFDVWGQGTTVTVSSGGGGSGGGGSGGGGSGGGGSEIVLTQSPATLSLSPGERATLSCRASSSVSSMHWYQQKPGQAPRPLIFATSNLASGIPARFSGSGSGTDYTLTISSLEPEDAAVYYCQQWIFNPPTFGGGTKVEIKTTTPAPRPPTPAPTIASQPLSLRPEACRPAAGGAVHTRGLDFACDIYIWAPLAGTCGVLLLSLVITLYCKRGRKKLLYIFKQPFMRPVQTTQEEDGCSCRFPEEEEGGCELRVKFSRSADAPAYQQGQNQLYNELNLGRREEYDVLDKRRGRDPEMGGKPRRKNPQEGLYNELQKDKMAEAYSEIGMKGERRRGKGHDGLYQGLSTATKDTYDALHMQALPPR

SEQ ID NO: 1428 - DNA, 1476 bp, Artificial Sequence
  source: /note="Description of Artificial Sequence: Synthetic polynucleotide"
atggccctccctgtcaccgccctgctgcttccgctggctcttctgctccacgccgctcggccccaagtgcagctcgtccagtccggtgcagaagtcaagaaacccggtgcttcagtgaaagtgtcctgcaaggcctccggttacaccttcacctcctacaacatgcactgggtccgccaagccccgggccagggactcgaatggatgggagccatctaccctggcaacggggacacctcatacaaccctaagttcaagggcagagtgaccatgactgcggacaagtccactagaacagcgtacatggagctgagcagcctgcggtccgaggatactgccgtgtactactgcgcccgctcctacttctacggaagctcgtcgtggtacttcgatgtctggggacagggcaccactgtgactgtgtcctccggtggcggaggctcgggcggaggcggaagcggcggcgggggatcgggaggaggagggtccgaaattgtgctgactcagagccccgccaccctgagcttgtcccccggggaaagggcaacgctgtcatgccgcgcctcgtcatccgtgtcctccatgcattggtaccagcagaagccgggacaggcccctcggccgctgatcttcgccacctccaatctcgcttccggcattccggcccggttctcgggaagcgggtcggggaccgactataccctgaccatctctagccttgaacctgaggacgccgcggtgtactattgtcaacagtggatctttaaccccccaaccttcggtggaggcaccaaagtggagattaagaccactaccccagcaccgaggccacccaccccggctcctaccatcgcctcccagcctctgtccctgcgtccggaggcatgtagacccgcagctggtggggccgtgcatacccggggtcttgacttcgcctgcgatatctacatttgggcccctctggctggtacttgcggggtcctgctgctttcactcgtgatcactctttactgtaagcgcggtcggaagaagctgctgtacatctttaagcaacccttcatgaggcctgtgcagactactcaagaggaggacggctgttcatgccggttcccagaggaggaggaaggcggctgcgaactgcgcgtgaaattcagccgcagcgcagatgctccagcctaccagcaggggcagaaccagctctacaacgaactcaatcttggtcggagagaggagtacgacgtgctggacaagcggagaggacgggacccagaaatgggcgggaagccgcgcagaaagaatccccaagagggcctgtacaacgagctccaaaaggataagatggcagaagcctatagcgagattggtatgaaaggggaacgcagaagaggcaaaggccacgacggactgtaccagggactcagcaccgccaccaaggacacctatgacgctcttcacatgcaggccctgccgcctcgg

SEQ ID NO: 1429 - protein, 5 aa, Artificial Sequence
  source: /note="Description of Artificial Sequence: Synthetic peptide"
NYWMH

SEQ ID NO: 1430 - protein, 17 aa, Artificial Sequence
  source: /note="Description of Artificial Sequence: Synthetic peptide"
FITPTTGYPEYNQKFKD

SEQ ID NO: 1431 - protein, 13 aa, Artificial Sequence
  source: /note="Description of Artificial Sequence: Synthetic peptide"
RKVGKGVYYALDY

SEQ ID NO: 1432 - protein, 7 aa, Artificial Sequence
  source: /note="Description of Artificial Sequence: Synthetic peptide"
GYTFTNY

SEQ ID NO: 1433 - protein, 6 aa, Artificial Sequence
  source: /note="Description of Artificial Sequence: Synthetic peptide"
TPTTGY

SEQ ID NO: 1434 - protein, 13 aa, Artificial Sequence
  source: /note="Description of Artificial Sequence: Synthetic peptide"
RKVGKGVYYALDY

SEQ ID NO: 1435 - protein, 8 aa, Artificial Sequence
  source: /note="Description of Artificial Sequence: Synthetic peptide"
GYTFTNYW

SEQ ID NO: 1436 - protein, 8 aa, Artificial Sequence
  source: /note="Description of Artificial Sequence: Synthetic peptide"
ITPTTGYP

SEQ ID NO: 1437 - protein, 15 aa, Artificial Sequence
  source: /note="Description of Artificial Sequence: Synthetic peptide"
ARRKVGKGVYYALDY

SEQ ID NO: 1438 - protein, 10 aa, Artificial Sequence
  source: /note="Description of Artificial Sequence: Synthetic peptide"
GYTFTNYWMH

SEQ ID NO: 1439 - protein, 17 aa, Artificial Sequence
  source: /note="Description of Artificial Sequence: Synthetic peptide"
FITPTTGYPEYNQKFKD

SEQ ID NO: 1440 - protein, 13 aa, Artificial Sequence
  source: /note="Description of Artificial Sequence: Synthetic peptide"
RKVGKGVYYALDY

SEQ ID NO: 1441 - protein, 122 aa, Artificial Sequence
  source: /note="Description of Artificial Sequence: Synthetic polypeptide"
QVQLVQSGAEVKKPGASVKVSCKASGYTFTNYWMHWVRQAPGQGLEWMGFITPTTGYPEYNQKFKDRVTMTADKSTSTAYMELSSLRSEDTAVYYCARRKVGKGVYYALDYWGQGTTVTVSS

SEQ ID NO: 1442 - DNA, 366 bp, Artificial Sequence
  source: /note="Description of Artificial Sequence: Synthetic polynucleotide"
caagtgcaactcgtccagtccggtgcagaagtcaagaaaccaggcgcatccgtgaaagtctcctgcaaagcctccggctacacattcactaactattggatgcattgggtgcgccaggccccgggacaggggctggagtggatggggttcattacccctaccaccggctaccctgagtacaaccagaagttcaaggatagggtcaccatgaccgctgacaagtccacctccaccgcgtacatggaactgtcatcgctccggtccgaggataccgcggtgtactactgcgcccggagaaaagtcggaaagggagtgtattacgccttggactactggggacaggggactaccgtgaccgtgtcgagc

SEQ ID NO: 1443 - protein, 11 aa, Artificial Sequence
  source: /note="Description of Artificial Sequence: Synthetic peptide"
RASGNIHNYLA

SEQ ID NO: 1444 - protein, 7 aa, Artificial Sequence
  source: /note="Description of Artificial Sequence: Synthetic peptide"
NTKTLAD

SEQ ID NO: 1445 - protein, 9 aa, Artificial Sequence
  source: /note="Description of Artificial Sequence: Synthetic peptide"
QHFWSSPWT

SEQ ID NO: 1446 - protein, 7 aa, Artificial Sequence
  source: /note="Description of Artificial Sequence: Synthetic peptide"
SGNIHNY

SEQ ID NO: 1447 - protein, 3 aa, Artificial Sequence
  source: /note="Description of Artificial Sequence: Synthetic peptide"
NTK

SEQ ID NO: 1448 - protein, 6 aa, Artificial Sequence
  source: /note="Description of Artificial Sequence: Synthetic peptide"
FWSSPW

SEQ ID NO: 1449 - protein, 6 aa, Artificial Sequence
  source: /note="Description of Artificial Sequence: Synthetic peptide"
GNIHNY

SEQ ID NO: 1450 - protein, 3 aa, Artificial Sequence
  source: /note="Description of Artificial Sequence: Synthetic peptide"
NTK

SEQ ID NO: 1451 - protein, 9 aa, Artificial Sequence
  source: /note="Description of Artificial Sequence: Synthetic peptide"
QHFWSSPWT

SEQ ID NO: 1452 - protein, 11 aa, Artificial Sequence
  source: /note="Description of Artificial Sequence: Synthetic peptide"
RASGNIHNYLA

SEQ ID NO: 1453 - protein, 7 aa, Artificial Sequence
  source: /note="Description of Artificial Sequence: Synthetic peptide"
NTKTLAD

SEQ ID NO: 1454 - protein, 9 aa, Artificial Sequence
  source: /note="Description of Artificial Sequence: Synthetic peptide"
QHFWSSPWT

SEQ ID NO: 1455 - protein, 107 aa, Artificial Sequence
  source: /note="Description of Artificial Sequence: Synthetic polypeptide"
DIQMTQSPSSLSASVGDRVTITCRASGNIHNYLAWYQQKPGKVPKLLIYNTKTLADGVPSRFSGSGSGTDYTLTISSLQPEDVATYYCQHFWSSPWTFGGGTKVEIK

SEQ ID NO: 1456 - DNA, 321 bp, Artificial Sequence
  source: /note="Description of Artificial Sequence: Synthetic polynucleotide"
gacatccagatgacccagtccccgtcaagccttagcgcctccgtgggcgaccgcgtgaccattacttgtcgggcgtcgggaaacatccacaactacctcgcctggtaccagcagaagccgggaaaggtccccaagctgctgatctacaataccaagactctggccgacggagtgccttcccgcttttccggttcgggaagcgggactgactacaccctgactatctcctcgctgcaacccgaagatgtggctacgtactactgccagcacttctggtcctctccctggaccttcggcggtggcactaaggtcgagattaag

SEQ ID NO: 1457 - protein, 20 aa, Artificial Sequence
  source: /note="Description of Artificial Sequence: Synthetic peptide"
GGGGSGGGGSGGGGSGGGGS

SEQ ID NO: 1458 - protein, 249 aa, Artificial Sequence
  source: /note="Description of Artificial Sequence: Synthetic polypeptide"
QVQLVQSGAEVKKPGASVKVSCKASGYTFTNYWMHWVRQAPGQGLEWMGFITPTTGYPEYNQKFKDRVTMTADKSTSTAYMELSSLRSEDTAVYYCARRKVGKGVYYALDYWGQGTTVTVSSGGGGSGGGGSGGGGSGGGGSDIQMTQSPSSLSASVGDRVTITCRASGNIHNYLAWYQQKPGKVPKLLIYNTKTLADGVPSRFSGSGSGTDYTLTISSLQPEDVATYYCQHFWSSPWTFGGGTKVEIK

SEQ ID NO: 1459 - DNA, 747 bp, Artificial Sequence
  source: /note="Description of Artificial Sequence: Synthetic polynucleotide"
caagtgcaactcgtccagtccggtgcagaagtcaagaaaccaggcgcatccgtgaaagtctcctgcaaagcctccggctacacattcactaactattggatgcattgggtgcgccaggccccgggacaggggctggagtggatggggttcattacccctaccaccggctaccctgagtacaaccagaagttcaaggatagggtcaccatgaccgctgacaagtccacctccaccgcgtacatggaactgtcatcgctccggtccgaggataccgcggtgtactactgcgcccggagaaaagtcggaaagggagtgtattacgccttggactactggggacaggggactaccgtgaccgtgtcgagcggtggaggcggctccggcggaggaggaagcgggggaggcggttcagggggcggaggaagcgacatccagatgacccagtccccgtcaagccttagcgcctccgtgggcgaccgcgtgaccattacttgtcgggcgtcgggaaacatccacaactacctcgcctggtaccagcagaagccgggaaaggtccccaagctgctgatctacaataccaagactctggccgacggagtgccttcccgcttttccggttcgggaagcgggactgactacaccctgactatctcctcgctgcaacccgaagatgtggctacgtactactgccagcacttctggtcctctccctggaccttcggcggtggcactaaggtcgagattaag

SEQ ID NO: 1460 - protein, 493 aa, Artificial Sequence
  source: /note="Description of Artificial Sequence: Synthetic polypeptide"
MALPVTALLLPLALLLHAARPQVQLVQSGAEVKKPGASVKVSCKASGYTFTNYWMHWVRQAPGQGLEWMGFITPTTGYPEYNQKFKDRVTMTADKSTSTAYMELSSLRSEDTAVYYCARRKVGKGVYYALDYWGQGTTVTVSSGGGGSGGGGSGGGGSGGGGSDIQMTQSPSSLSASVGDRVTITCRASGNIHNYLAWYQQKPGKVPKLLIYNTKTLADGVPSRFSGSGSGTDYTLTISSLQPEDVATYYCQHFWSSPWTFGGGTKVEIKTTTPAPRPPTPAPTIASQPLSLRPEACRPAAGGAVHTRGLDFACDIYIWAPLAGTCGVLLLSLVITLYCKRGRKKLLYIFKQPFMRPVQTTQEEDGCSCRFPEEEEGGCELRVKFSRSADAPAYQQGQNQLYNELNLGRREEYDVLDKRRGRDPEMGGKPRRKNPQEGLYNELQKDKMAEAYSEIGMKGERRRGKGHDGLYQGLSTATKDTYDALHMQALPPR

SEQ ID NO: 1461 - DNA, 1479 bp, Artificial Sequence
  source: /note="Description of Artificial Sequence: Synthetic polynucleotide"
atggccctccctgtcaccgccctgctgcttccgctggctcttctgctccacgccgctcggccccaagtgcaactcgtccagtccggtgcagaagtcaagaaaccaggcgcatccgtgaaagtctcctgcaaagcctccggctacacattcactaactattggatgcattgggtgcgccaggccccgggacaggggctggagtggatggggttcattacccctaccaccggctaccctgagtacaaccagaagttcaaggatagggtcaccatgaccgctgacaagtccacctccaccgcgtacatggaactgtcatcgctccggtccgaggataccgcggtgtactactgcgcccggagaaaagtcggaaagggagtgtattacgccttggactactggggacaggggactaccgtgaccgtgtcgagcggtggaggcggctccggcggaggaggaagcgggggaggcggttcagggggcggaggaagcgacatccagatgacccagtccccgtcaagccttagcgcctccgtgggcgaccgcgtgaccattacttgtcgggcgtcgggaaacatccacaactacctcgcctggtaccagcagaagccgggaaaggtccccaagctgctgatctacaataccaagactctggccgacggagtgccttcccgcttttccggttcgggaagcgggactgactacaccctgactatctcctcgctgcaacccgaagatgtggctacgtactactgccagcacttctggtcctctccctggaccttcggcggtggcactaaggtcgagattaagaccactaccccagcaccgaggccacccaccccggctcctaccatcgcctcccagcctctgtccctgcgtccggaggcatgtagacccgcagctggtggggccgtgcatacccggggtcttgacttcgcctgcgatatctacatttgggcccctctggctggtacttgcggggtcctgctgctttcactcgtgatcactctttactgtaagcgcggtcggaagaagctgctgtacatctttaagcaacccttcatgaggcctgtgcagactactcaagaggaggacggctgttcatgccggttcccagaggaggaggaaggcggctgcgaactgcgcgtgaaattcagccgcagcgcagatgctccagcctaccagcaggggcagaaccagctctacaacgaactcaatcttggtcggagagaggagtacgacgtgctggacaagcggagaggacgggacccagaaatgggcgggaagccgcgcagaaagaatccccaagagggcctgtacaacgagctccaaaaggataagatggcagaagcctatagcgagattggtatgaaaggggaacgcagaagaggcaaaggccacgacggactgtaccagggactcagcaccgccaccaaggacacctatgacgctcttcacatgcaggccctgccgcctcgg

SEQ ID NO: 1462 - protein, 5 aa, Artificial Sequence
  source: /note="Description of Artificial Sequence: Synthetic peptide"
NYWMH

SEQ ID NO: 1463 - protein, 17 aa, Artificial Sequence
  source: /note="Description of Artificial Sequence: Synthetic peptide"
FITPTTGYPEYNQKFKD

SEQ ID NO: 1464 - protein, 13 aa, Artificial Sequence
  source: /note="Description of Artificial Sequence: Synthetic peptide"
RKVGKGVYYALDY

SEQ ID NO: 1465 - protein, 7 aa, Artificial Sequence
  source: /note="Description of Artificial Sequence: Synthetic peptide"
GYTFTNY

SEQ ID NO: 1466 - protein, 6 aa, Artificial Sequence
  source: /note="Description of Artificial Sequence: Synthetic peptide"
TPTTGY

SEQ ID NO: 1467 - protein, 13 aa, Artificial Sequence
  source: /note="Description of Artificial Sequence: Synthetic peptide"
RKVGKGVYYALDY

SEQ ID NO: 1468 - protein, 8 aa, Artificial Sequence
  source: /note="Description of Artificial Sequence: Synthetic peptide"
GYTFTNYW

SEQ ID NO: 1469 - protein, 8 aa, Artificial Sequence
  source: /note="Description of Artificial Sequence: Synthetic peptide"
ITPTTGYP

SEQ ID NO: 1470 - protein, 15 aa, Artificial Sequence
  source: /note="Description of Artificial Sequence: Synthetic peptide"
ARRKVGKGVYYALDY

SEQ ID NO: 1471 - protein, 10 aa, Artificial Sequence
  source: /note="Description of Artificial Sequence: Synthetic peptide"
GYTFTNYWMH

SEQ ID NO: 1472 - protein, 17 aa, Artificial Sequence
  source: /note="Description of Artificial Sequence: Synthetic peptide"
FITPTTGYPEYNQKFKD

SEQ ID NO: 1473 - protein, 13 aa, Artificial Sequence
  source: /note="Description of Artificial Sequence: Synthetic peptide"
RKVGKGVYYALDY

SEQ ID NO: 1474 - protein, 122 aa, Artificial Sequence
  source: /note="Description of Artificial Sequence: Synthetic polypeptide"
QVQLVQSGAEVKKPGSSVKVSCKASGYTFTNYWMHWVRQAPGQGLEWMGFITPTTGYPEYNQKFKDRVTITADKSTSTAYMELSSLRSEDTAVYYCARRKVGKGVYYALDYWGQGTTVTVSS

SEQ ID NO: 1475 - DNA, 366 bp, Artificial Sequence
  source: /note="Description of Artificial Sequence: Synthetic polynucleotide"
caagtccaactcgtccaatcaggagcagaagtcaagaagcccggaagctctgtcaaagtgtcctgcaaggcctccggttacaccttcaccaactattggatgcactgggtcagacaggccccgggacagggcttggaatggatgggtttcatcactccaaccaccggttacccggagtacaaccagaagtttaaggaccgcgtgaccattactgccgacaagtccacgagcaccgcttacatggaacttagcagcctgcggtccgaggacactgccgtgtattactgcgcgcggaggaaggtcggaaagggagtgtactacgcactggactactggggccagggaaccaccgtgactgtgtcctcc

SEQ ID NO: 1476 - protein, 11 aa, Artificial Sequence
  source: /note="Description of Artificial Sequence: Synthetic peptide"
RASGNIHNYLA

SEQ ID NO: 1477 - protein, 7 aa, Artificial Sequence
  source: /note="Description of Artificial Sequence: Synthetic peptide"
NTKTLAD

SEQ ID NO: 1478 - protein, 9 aa, Artificial Sequence
  source: /note="Description of Artificial Sequence: Synthetic peptide"
QHFWSSPWT

SEQ ID NO: 1479 - protein, 7 aa, Artificial Sequence
  source: /note="Description of Artificial Sequence: Synthetic peptide"
SGNIHNY

SEQ ID NO: 1480 - protein, 3 aa, Artificial Sequence
  source: /note="Description of Artificial Sequence: Synthetic peptide"
NTK

SEQ ID NO: 1481 - protein, 6 aa, Artificial Sequence
  source: /note="Description of Artificial Sequence: Synthetic peptide"
FWSSPW

SEQ ID NO: 1482 - protein, 6 aa, Artificial Sequence
  source: /note="Description of Artificial Sequence: Synthetic peptide"
GNIHNY

SEQ ID NO: 1483 - protein, 3 aa, Artificial Sequence
  source: /note="Description of Artificial Sequence: Synthetic peptide"
NTK

SEQ ID NO: 1484 - protein, 9 aa, Artificial Sequence
  source: /note="Description of Artificial Sequence: Synthetic peptide"
QHFWSSPWT

SEQ ID NO: 1485 - protein, 11 aa, Artificial Sequence
  source: /note="Description of Artificial Sequence: Synthetic peptide"
RASGNIHNYLA

SEQ ID NO: 1486 - protein, 7 aa, Artificial Sequence
  source: /note="Description of Artificial Sequence: Synthetic peptide"
NTKTLAD

SEQ ID NO: 1487 - protein, 9 aa, Artificial Sequence
  source: /note="Description of Artificial Sequence: Synthetic peptide"
QHFWSSPWT

SEQ ID NO: 1488 - protein, 107 aa, Artificial Sequence; identical to SEQ ID NO: 1455
  source: /note="Description of Artificial Sequence: Synthetic polypeptide"

SEQ ID NO: 1489 - DNA, 321 bp, Artificial Sequence
  source: /note="Description of Artificial Sequence: Synthetic polynucleotide"
gatattcagatgacccagtccccttcatccctgagcgcctcagtgggcgatagagtgaccatcacttgtcgcgcctcgggcaatatccacaactacctcgcctggtaccagcagaagccgggaaaagtgcctaagctgctgatctacaacactaagaccctggcggatggagtgcccagccggttctccggctccggcagcggcacagactacaccctcaccatctcctcgctgcaaccagaggacgtggctacctactactgccagcatttctggtcgtccccctggactttcggaggggggaccaaagtggagattaag

SEQ ID NO: 1490 - protein, 20 aa, Artificial Sequence
  source: /note="Description of Artificial Sequence: Synthetic peptide"
GGGGSGGGGSGGGGSGGGGS

SEQ ID NO: 1491 - protein, 249 aa, Artificial Sequence
  source: /note="Description of Artificial Sequence: Synthetic polypeptide"
QVQLVQSGAEVKKPGSSVKVSCKASGYTFTNYWMHWVRQAPGQGLEWMGFITPTTGYPEYNQKFKDRVTITADKSTSTAYMELSSLRSEDTAVYYCARRKVGKGVYYALDYWGQGTTVTVSSGGGGSGGGGSGGGGSGGGGSDIQMTQSPSSLSASVGDRVTITCRASGNIHNYLAWYQQKPGKVPKLLIYNTKTLADGVPSRFSGSGSGTDYTLTISSLQPEDVATYYCQHFWSSPWTFGGGTKVEIK

SEQ ID NO: 1492 - DNA, 747 bp, Artificial Sequence
  source: /note="Description of Artificial Sequence: Synthetic polynucleotide"
caagtccaactcgtccaatcaggagcagaagtcaagaagcccggaagctctgtcaaagtgtcctgcaaggcctccggttacaccttcaccaactattggatgcactgggtcagacaggccccgggacagggcttggaatggatgggtttcatcactccaaccaccggttacccggagtacaaccagaagtttaaggaccgcgtgaccattactgccgacaagtccacgagcaccgcttacatggaacttagcagcctgcggtccgaggacactgccgtgtattactgcgcgcggaggaaggtcggaaagggagtgtactacgcactggactactggggccagggaaccaccgtgactgtgtcctccggtggcggagggtcgggaggggggggctcgggaggaggagggtccgggggcggtggctcagatattcagatgacccagtccccttcatccctgagcgcctcagtgggcgatagagtgaccatcacttgtcgcgcctcgggcaatatccacaactacctcgcctggtaccagcagaagccgggaaaagtgcctaagctgctgatctacaacactaagaccctggcggatggagtgcccagccggttctccggctccggcagcggcacagactacaccctcaccatctcctcgctgcaaccagaggacgtggctacctactactgccagcatttctggtcgtccccctggactttcggaggggggaccaaagtggagattaag

SEQ ID NO: 1493 - protein, 493 aa, Artificial Sequence
  source: /note="Description of Artificial Sequence: Synthetic polypeptide"
MALPVTALLLPLALLLHAARPQVQLVQSGAEVKKPGSSVKVSCKASGYTFTNYWMHWVRQAPGQGLEWMGFITPTTGYPEYNQKFKDRVTITADKSTSTAYMELSSLRSEDTAVYYCARRKVGKGVYYALDYWGQGTTVTVSSGGGGSGGGGSGGGGSGGGGSDIQMTQSPSSLSASVGDRVTITCRASGNIHNYLAWYQQKPGKVPKLLIYNTKTLADGVPSRFSGSGSGTDYTLTISSLQPEDVATYYCQHFWSSPWTFGGGTKVEIKTTTPAPRPPTPAPTIASQPLSLRPEACRPAAGGAVHTRGLDFACDIYIWAPLAGTCGVLLLSLVITLYCKRGRKKLLYIFKQPFMRPVQTTQEEDGCSCRFPEEEEGGCELRVKFSRSADAPAYQQGQNQLYNELNLGRREEYDVLDKRRGRDPEMGGKPRRKNPQEGLYNELQKDKMAEAYSEIGMKGERRRGKGHDGLYQGLSTATKDTYDALHMQALPPR

SEQ ID NO: 1494 - DNA, 1479 bp, Artificial Sequence
  source: /note="Description of Artificial Sequence: Synthetic polynucleotide"
atggccctccctgtcaccgccctgctgcttccgctggctcttctgctccacgccgctcggccccaagtccaactcgtccaatcaggagcagaagtcaagaagcccggaagctctgtcaaagtgtcctgcaaggcctccggttacaccttcaccaactattggatgcactgggtcagacaggccccgggacagggcttggaatggatgggtttcatcactccaaccaccggttacccggagtacaaccagaagtttaaggaccgcgtgaccattactgccgacaagtccacgagcaccgcttacatggaacttagcagcctgcggtccgaggacactgccgtgtattactgcgcgcggaggaaggtcggaaagggagtgtactacgcactggactactggggccagggaaccaccgtgactgtgtcctccggtggcggagggtcgggaggggggggctcgggaggaggagggtccgggggcggtggctcagatattcagatgacccagtccccttcatccctgagcgcctcagtgggcgatagagtgaccatcacttgtcgcgcctcgggcaatatccacaactacctcgcctggtaccagcagaagccgggaaaagtgcctaagctgctgatctacaacactaagaccctggcggatggagtgcccagccggttctccggctccggcagcggcacagactacaccctcaccatctcctcgctgcaaccagaggacgtggctacctactactgccagcatttctggtcgtccccctggactttcggaggggggaccaaagtggagattaagaccactaccccagcaccgaggccacccaccccggctcctaccatcgcctcccagcctctgtccctgcgtccggaggcatgtagacccgcagctggtggggccgtgcatacccggggtcttgacttcgcctgcgatatctacatttgggcccctctggctggtacttgcggggtcctgctgctttcactcgtgatcactctttactgtaagcgcggtcggaagaagctgctgtacatctttaagcaacccttcatgaggcctgtgcagactactcaagaggaggacggctgttcatgccggttcccagaggaggaggaaggcggctgcgaactgcgcgtgaaattcagccgcagcgcagatgctccagcctaccagcaggggcagaaccagctctacaacgaactcaatcttggtcggagagaggagtacgacgtgctggacaagcggagaggacgggacccagaaatgggcgggaagccgcgcagaaagaatccccaagagggcctgtacaacgagctccaaaaggataagatggcagaagcctatagcgagattggtatgaaaggggaacgcagaagaggcaaaggccacgacggactgtaccagggactcagcaccgccaccaaggacacctatgacgctcttcacatgcaggccctgccgcctcgg

SEQ ID NO: 1495 - protein, 5 aa, Artificial Sequence
  source: /note="Description of Artificial Sequence: Synthetic peptide"
NYWMH

SEQ ID NO: 1496 - protein, 17 aa, Artificial Sequence
  source: /note="Description of Artificial Sequence: Synthetic peptide"
FITPTTGYPEYNQKFKD

SEQ ID NO: 1497 - protein, 13 aa, Artificial Sequence
  source: /note="Description of Artificial Sequence: Synthetic peptide"
RKVGKGVYYALDY

SEQ ID NO: 1498 - protein, 7 aa, Artificial Sequence
  source: /note="Description of Artificial Sequence: Synthetic peptide"
GYTFTNY

SEQ ID NO: 1499 - protein, 6 aa, Artificial Sequence
  source: /note="Description of Artificial Sequence: Synthetic peptide"
TPTTGY

SEQ ID NO: 1500 - protein, 13 aa, Artificial Sequence
  source: /note="Description of Artificial Sequence: Synthetic peptide"
RKVGKGVYYALDY

SEQ ID NO: 1501 - protein, 8 aa, Artificial Sequence
  source: /note="Description of Artificial Sequence: Synthetic peptide"
GYTFTNYW

SEQ ID NO: 1502 - protein, 8 aa, Artificial Sequence
  source: /note="Description of Artificial Sequence: Synthetic peptide"
ITPTTGYP

SEQ ID NO: 1503 - protein, 15 aa, Artificial Sequence
  source: /note="Description of Artificial Sequence: Synthetic peptide"
ARRKVGKGVYYALDY

SEQ ID NO: 1504 - protein, 10 aa, Artificial Sequence
  source: /note="Description of Artificial Sequence: Synthetic peptide"
GYTFTNYWMH

SEQ ID NO: 1505 - protein, 17 aa, Artificial Sequence
  source: /note="Description of Artificial Sequence: Synthetic peptide"
FITPTTGYPEYNQKFKD

SEQ ID NO: 1506 - protein, 13 aa, Artificial Sequence
  source: /note="Description of Artificial Sequence: Synthetic peptide"
RKVGKGVYYALDY

SEQ ID NO: 1507 - protein, 122 aa, Artificial Sequence; identical to SEQ ID NO: 1441
  source: /note="Description of Artificial Sequence: Synthetic polypeptide"

SEQ ID NO: 1508 - DNA, 366 bp, Artificial Sequence
  source: /note="Description of Artificial Sequence: Synthetic polynucleotide"
caagtccaactcgtccagtccggtgcagaagtcaagaaacccggagcttccgtgaaagtgtcctgcaaagcctccggttacacctttacgaactactggatgcattgggtgcgccaggccccgggacaggggctggaatggatgggcttcattacccccaccaccggataccccgagtacaatcagaagttcaaggaccgggtcaccatgaccgccgacaagtcaacctctactgcttacatggagctgtccagcctgcggtcggaagataccgccgtgtattactgcgcgagaaggaaagtcggaaagggagtgtactatgccctggactactggggacaggggaccactgtgactgtgtcaagc

SEQ ID NO: 1509 - protein, 11 aa, Artificial Sequence
  source: /note="Description of Artificial Sequence: Synthetic peptide"
RASGNIHNYLA

SEQ ID NO: 1510 - protein, 7 aa, Artificial Sequence
  source: /note="Description of Artificial Sequence: Synthetic peptide"
NTKTLAD

SEQ ID NO: 1511 - protein, 9 aa, Artificial Sequence
  source: /note="Description of Artificial Sequence: Synthetic peptide"
QHFWSSPWT

SEQ ID NO: 1512 - protein, 7 aa, Artificial Sequence
  source: /note="Description of Artificial Sequence: Synthetic peptide"
SGNIHNY

SEQ ID NO: 1513 - protein, 3 aa, Artificial Sequence
  source: /note="Description of Artificial Sequence: Synthetic peptide"
NTK

SEQ ID NO: 1514 - protein, 6 aa, Artificial Sequence
  source: /note="Description of Artificial Sequence: Synthetic peptide"
FWSSPW

SEQ ID NO: 1515 - protein, 6 aa, Artificial Sequence
  source: /note="Description of Artificial Sequence: Synthetic peptide"
GNIHNY

SEQ ID NO: 1516 - protein, 3 aa, Artificial Sequence
  source: /note="Description of Artificial Sequence: Synthetic peptide"
NTK

SEQ ID NO: 1517 - protein, 9 aa, Artificial Sequence
  source: /note="Description of Artificial Sequence: Synthetic peptide"
QHFWSSPWT

SEQ ID NO: 1518 - protein, 11 aa, Artificial Sequence
  source: /note="Description of Artificial Sequence: Synthetic peptide"
RASGNIHNYLA

SEQ ID NO: 1519 - protein, 7 aa, Artificial Sequence
  source: /note="Description of Artificial Sequence: Synthetic peptide"
NTKTLAD

SEQ ID NO: 1520 - protein, 9 aa, Artificial Sequence
  source: /note="Description of Artificial Sequence: Synthetic peptide"
QHFWSSPWT

SEQ ID NO: 1521 - protein, 107 aa, Artificial Sequence
  source: /note="Description of Artificial Sequence: Synthetic polypeptide"
AIRMTQSPFSLSASVGDRVTITCRASGNIHNYLAWYQQKPAKAPKLFIYNTKTLADGVPSRFSGSGSGTDYTLTISSLQPEDFATYYCQHFWSSPWTFGGGTKVEIK

SEQ ID NO: 1522 - DNA, 321 bp, Artificial Sequence
  source: /note="Description of Artificial Sequence: Synthetic polynucleotide"
gcgatccgcatgacccagagcccgttctccctgtccgcgtccgtgggggaccgcgtgactatcacgtgtcgggcctccgggaacatccacaactacctcgcatggtaccagcagaagccggccaaggcccctaagttgttcatctacaacaccaagactcttgccgacggagtgccgtcccggtttagcggaagcggttccggcaccgactacaccctgactatctcgagcctgcaaccagaagatttcgccacttactactgccagcacttctggtcgtccccttggacattcggcggcggcaccaaggtcgagattaag

SEQ ID NO: 1523 - protein, 20 aa, Artificial Sequence
  source: /note="Description of Artificial Sequence: Synthetic peptide"
GGGGSGGGGSGGGGSGGGGS

SEQ ID NO: 1524 - protein, 249 aa, Artificial Sequence
  source: /note="Description of Artificial Sequence: Synthetic polypeptide"
QVQLVQSGAEVKKPGASVKVSCKASGYTFTNYWMHWVRQAPGQGLEWMGFITPTTGYPEYNQKFKDRVTMTADKSTSTAYMELSSLRSEDTAVYYCARRKVGKGVYYALDYWGQGTTVTVSSGGGGSGGGGSGGGGSGGGGSAIRMTQSPFSLSASVGDRVTITCRASGNIHNYLAWYQQKPAKAPKLFIYNTKTLADGVPSRFSGSGSGTDYTLTISSLQPEDFATYYCQHFWSSPWTFGGGTKVEIK

SEQ ID NO: 1525 - DNA, 747 bp, Artificial Sequence
  source: /note="Description of Artificial Sequence: Synthetic polynucleotide"
caagtccaactcgtccagtccggtgcagaagtcaagaaacccggagcttccgtgaaagtgtcctgcaaagcctccggttacacctttacgaactactggatgcattgggtgcgccaggccccgggacaggggctggaatggatgggcttcattacccccaccaccggataccccgagtacaatcagaagttcaaggaccgggtcaccatgaccgccgacaagtcaacctctactgcttacatggagctgtccagcctgcggtcggaagataccgccgtgtattactgcgcgagaaggaaagtcggaaagggagtgtactatgccctggactactggggacaggggaccactgtgactgtgtcaagcggaggcggaggctcggggggcggaggttcgggcggaggaggatcagggggcggcggttccgcgatccgcatgacccagagcccgttctccctgtccgcgtccgtgggggaccgcgtgactatcacgtgtcgggcctccgggaacatccacaactacctcgcatggtaccagcagaagccggccaaggcccctaagttgttcatctacaacaccaagactcttgccgacggagtgccgtcccggtttagcggaagcggttccggcaccgactacaccctgactatctcgagcctgcaaccagaagatttcgccacttactactgccagcacttctggtcgtccccttggacattcggcggcggcaccaaggtcgagattaag

SEQ ID NO: 1526 - protein, 493 aa, Artificial Sequence
  source: /note="Description of Artificial Sequence: Synthetic polypeptide"
MALPVTALLLPLALLLHAARPQVQLVQSGAEVKKPGASVKVSCKASGYTFTNYWMHWVRQAPGQGLEWMGFITPTTGYPEYNQKFKDRVTMTADKSTSTAYMELSSLRSEDTAVYYCARRKVGKGVYYALDYWGQGTTVTVSSGGGGSGGGGSGGGGSGGGGSAIRMTQSPFSLSASVGDRVTITCRASGNIHNYLAWYQQKPAKAPKLFIYNTKTLADGVPSRFSGSGSGTDYTLTISSLQPEDFATYYCQHFWSSPWTFGGGTKVEIKTTTPAPRPPTPAPTIASQPLSLRPEACRPAAGGAVHTRGLDFACDIYIWAPLAGTCGVLLLSLVITLYCKRGRKKLLYIFKQPFMRPVQTTQEEDGCSCRFPEEEEGGCELRVKFSRSADAPAYQQGQNQLYNELNLGRREEYDVLDKRRGRDPEMGGKPRRKNPQEGLYNELQKDKMAEAYSEIGMKGERRRGKGHDGLYQGLSTATKDTYDALHMQALPPR

SEQ ID NO: 1527 - DNA, 1479 bp, Artificial Sequence
  source: /note="Description of Artificial Sequence: Synthetic polynucleotide"
atggccctccctgtcaccgccctgctgcttccgctggctcttctgctccacgccgctcggccccaagtccaactcgtccagtccggtgcagaagtcaagaaacccggagcttccgtgaaagtgtcctgcaaagcctccggttacacctttacgaactactggatgcattgggtgcgccaggccccgggacaggggctggaatggatgggcttcattacccccaccaccggataccccgagtacaatcagaagttcaaggaccgggtcaccatgaccgccgacaagtcaacctctactgcttacatggagctgtccagcctgcggtcggaagataccgccgtgtattactgcgcgagaaggaaagtcggaaagggagtgtactatgccctggactactggggacaggggaccactgtgactgtgtcaagcggaggcggaggctcggggggcggaggttcgggcggaggaggatcagggggcggcggttccgcgatccgcatgacccagagcccgttctccctgtccgcgtccgtgggggaccgcgtgactatcacgtgtcgggcctccgggaacatccacaactacctcgcatggtaccagcagaagccggccaaggcccctaagttgttcatctacaacaccaagactcttgccgacggagtgccgtcccggtttagcggaagcggttccggcaccgactacaccctgactatctcgagcctgcaaccagaagatttcgccacttactactgccagcacttctggtcgtccccttggacattcggcggcggcaccaaggtcgagattaagaccactaccccagcaccgaggccacccaccccggctcctaccatcgcctcccagcctctgtccctgcgtccggaggcatgtagacccgcagctggtggggccgtgcatacccggggtcttgacttcgcctgcgatatctacatttgggcccctctggctggtacttgcggggtcctgctgctttcactcgtgatcactctttactgtaagcgcggtcggaagaagctgctgtacatctttaagcaacccttcatgaggcctgtgcagactactcaagaggaggacggctgttcatgccggttcccagaggaggaggaaggcggctgcgaactgcgcgtgaaattcagccgcagcgcagatgctccagcctaccagcaggggcagaaccagctctacaacgaactcaatcttggtcggagagaggagtacgacgtgctggacaagcggagaggacgggacccagaaatgggcgggaagccgcgcagaaagaatccccaagagggcctgtacaacgagctccaaaaggataagatggcagaagcctatagcgagattggtatgaaaggggaacgcagaagaggcaaaggccacgacggactgtaccagggactcagcaccgccaccaaggacacctatgacgctcttcacatgcaggccctgccgcctcgg

SEQ ID NO: 1528 - protein, 5 aa, Artificial Sequence
  source: /note="Description of Artificial Sequence: Synthetic peptide"
NYWMH

SEQ ID NO: 1529 - protein, 17 aa, Artificial Sequence
  source: /note="Description of Artificial Sequence: Synthetic peptide"
FITPTTGYPEYNQKFKD

SEQ ID NO: 1530 - protein, 13 aa, Artificial Sequence
  source: /note="Description of Artificial Sequence: Synthetic peptide"
RKVGKGVYYALDY

SEQ ID NO: 1531 - protein, 7 aa, Artificial Sequence
  source: /note="Description of Artificial Sequence: Synthetic peptide"
GYTFTNY

SEQ ID NO: 1532 - protein, 6 aa, Artificial Sequence
  source: /note="Description of Artificial Sequence: Synthetic peptide"
TPTTGY

SEQ ID NO: 1533 - protein, 13 aa, Artificial Sequence
  source: /note="Description of Artificial Sequence: Synthetic peptide"
RKVGKGVYYALDY

SEQ ID NO: 1534 - protein, 8 aa, Artificial Sequence
  source: /note="Description of Artificial Sequence: Synthetic peptide"
GYTFTNYW

SEQ ID NO: 1535 - protein, 8 aa, Artificial Sequence
  source: /note="Description of Artificial Sequence: Synthetic peptide"
ITPTTGYP

SEQ ID NO: 1536 - protein, 15 aa, Artificial Sequence
  source: /note="Description of Artificial Sequence: Synthetic peptide"
ARRKVGKGVYYALDY

SEQ ID NO: 1537 - protein, 10 aa, Artificial Sequence
  source: /note="Description of Artificial Sequence: Synthetic peptide"
GYTFTNYWMH

SEQ ID NO: 1538 - protein, 17 aa, Artificial Sequence
  source: /note="Description of Artificial Sequence: Synthetic peptide"
FITPTTGYPEYNQKFKD

SEQ ID NO: 1539 - protein, 13 aa, Artificial Sequence
  source: /note="Description of Artificial Sequence: Synthetic peptide"
RKVGKGVYYALDY

SEQ ID NO: 1540 - protein, 122 aa, Artificial Sequence; identical to SEQ ID NO: 1474
  source: /note="Description of Artificial Sequence: Synthetic polypeptide"

SEQ ID NO: 1541 - DNA, 366 bp, Artificial Sequence
  source: /note="Description of Artificial Sequence: Synthetic polynucleotide"
caagtccaactcgtccaaagcggtgcagaagtcaagaagcccggttcctccgtgaaagtgtcctgcaaagcctcgggctacaccttcactaattactggatgcattgggtccgccaggcgcccggacagggattggaatggatggggttcatcacgccgaccaccggatacccggagtacaaccagaagttcaaggacagagtgaccattaccgccgataagtccacctccaccgcttacatggagctctcctcactgcggtccgaagatacagccgtgtactattgtgctcgccggaaagtcggaaagggagtgtactacgccctggactattggggccagggcaccaccgtgaccgtgtcctcg

SEQ ID NO: 1542 - protein, 11 aa, Artificial Sequence
  source: /note="Description of Artificial Sequence: Synthetic peptide"
RASGNIHNYLA

SEQ ID NO: 1543 - protein, 7 aa, Artificial Sequence
  source: /note="Description of Artificial Sequence: Synthetic peptide"
NTKTLAD

SEQ ID NO: 1544 - protein, 9 aa, Artificial Sequence
  source: /note="Description of Artificial Sequence: Synthetic peptide"
QHFWSSPWT

SEQ ID NO: 1545 - protein, 7 aa, Artificial Sequence
  source: /note="Description of Artificial Sequence: Synthetic peptide"
SGNIHNY

SEQ ID NO: 1546 - protein, 3 aa, Artificial Sequence
  source: /note="Description of Artificial Sequence: Synthetic peptide"
NTK

SEQ ID NO: 1547 - protein, 6 aa, Artificial Sequence
  source: /note="Description of Artificial Sequence: Synthetic peptide"
FWSSPW

SEQ ID NO: 1548 - protein, 6 aa, Artificial Sequence
  source: /note="Description of Artificial Sequence: Synthetic peptide"
GNIHNY

SEQ ID NO: 1549 - protein, 3 aa, Artificial Sequence
  source: /note="Description of Artificial Sequence: Synthetic peptide"
NTK

SEQ ID NO: 1550 - protein, 9 aa, Artificial Sequence
  source: /note="Description of Artificial Sequence: Synthetic peptide"
QHFWSSPWT

SEQ ID NO: 1551 - protein, 11 aa, Artificial Sequence
  source: /note="Description of Artificial Sequence: Synthetic peptide"
RASGNIHNYLA

SEQ ID NO: 1552 - protein, 7 aa, Artificial Sequence
  source: /note="Description of Artificial Sequence: Synthetic peptide"
NTKTLAD

SEQ ID NO: 1553 - protein, 9 aa, Artificial Sequence
  source: /note="Description of Artificial Sequence: Synthetic peptide"
QHFWSSPWT

SEQ ID NO: 1554 - protein, 107 aa, Artificial Sequence; identical to SEQ ID NO: 1521
  source: /note="Description of Artificial Sequence: Synthetic polypeptide"

SEQ ID NO: 1555 - DNA, 321 bp, Artificial Sequence
  source: /note="Description of Artificial Sequence: Synthetic polynucleotide"
gccattaggatgactcagtcccctttctccctctccgcgagcgtgggcgaccgcgtgacgatcacttgccgggcctcggggaacattcacaactacctggcctggtaccagcagaagccggccaaggcccctaagctgttcatctacaacaccaagacccttgcggacggagtgccatcgagattttccggctcgggctctgggaccgattacactctgactatctcaagcctgcaacctgaggacttcgccacttactactgccagcacttctggagcagcccctggactttcggtggcgggaccaaggtcgaaatcaag

SEQ ID NO: 1556 - protein, 20 aa, Artificial Sequence
  source: /note="Description of Artificial Sequence: Synthetic peptide"
GGGGSGGGGSGGGGSGGGGS

SEQ ID NO: 1557 - protein, 249 aa, Artificial Sequence
  source: /note="Description of Artificial Sequence: Synthetic polypeptide"
QVQLVQSGAEVKKPGSSVKVSCKASGYTFTNYWMHWVRQAPGQGLEWMGFITPTTGYPEYNQKFKDRVTITADKSTSTAYMELSSLRSEDTAVYYCARRKVGKGVYYALDYWGQGTTVTVSSGGGGSGGGGSGGGGSGGGGSAIRMTQSPFSLSASVGDRVTITCRASGNIHNYLAWYQQKPAKAPKLFIYNTKTLADGVPSRFSGSGSGTDYTLTISSLQPEDFATYYCQHFWSSPWTFGGGTKVEIK

SEQ ID NO: 1558 - DNA, 747 bp, Artificial Sequence
  source: /note="Description of Artificial Sequence: Synthetic polynucleotide"
caagtccaactcgtccaaagcggtgcagaagtcaagaagcccggttcctccgtgaaagtgtcctgcaaagcctcgggctacaccttcactaattactggatgcattgggtccgccaggcgcccggacagggattggaatggatggggttcatcacgccgaccaccggatacccggagtacaaccagaagttcaaggacagagtgaccattaccgccgataagtccacctccaccgcttacatggagctctcctcactgcggtccgaagatacagccgtgtactattgtgctcgccggaaagtcggaaagggagtgtactacgccctggactattggggccagggcaccaccgtgaccgtgtcctcgggaggagggggttcgggcggaggcggctccggtggaggcggaagcggagggggcggatcagccattaggatgactcagtcccctttctccctctccgcgagcgtgggcgaccgcgtgacgatcacttgccgggcctcggggaacattcacaactacctggcctggtaccagcagaagccggccaaggcccctaagctgttcatctacaacaccaagacccttgcggacggagtgccatcgagattttccggctcgggctctgggaccgattacactctgactatctcaagcctgcaacctgaggacttcgccacttactactgccagcacttctggagcagcccctggactttcggtggcgggaccaaggtcgaaatcaag

SEQ ID NO: 1559 - protein, 493 aa, Artificial Sequence
  source: /note="Description of Artificial Sequence: Synthetic polypeptide"
MALPVTALLLPLALLLHAARPQVQLVQSGAEVKKPGSSVKVSCKASGYTFTNYWMHWVRQAPGQGLEWMGFITPTTGYPEYNQKFKDRVTITADKSTSTAYMELSSLRSEDTAVYYCARRKVGKGVYYALDYWGQGTTVTVSSGGGGSGGGGSGGGGSGGGGSAIRMTQSPFSLSASVGDRVTITCRASGNIHNYLAWYQQKPAKAPKLFIYNTKTLADGVPSRFSGSGSGTDYTLTISSLQPEDFATYYCQHFWSSPWTFGGGTKVEIKTTTPAPRPPTPAPTIASQPLSLRPEACRPAAGGAVHTRGLDFACDIYIWAPLAGTCGVLLLSLVITLYCKRGRKKLLYIFKQPFMRPVQTTQEEDGCSCRFPEEEEGGCELRVKFSRSADAPAYQQGQNQLYNELNLGRREEYDVLDKRRGRDPEMGGKPRRKNPQEGLYNELQKDKMAEAYSEIGMKGERRRGKGHDGLYQGLSTATKDTYDALHMQALPPR

SEQ ID NO: 1560 - DNA, 1479 bp, Artificial Sequence
  source: /note="Description of Artificial Sequence: Synthetic polynucleotide"
atggccctccctgtcaccgccctgctgcttccgctggctcttctgctccacgccgctcggccccaagtccaactcgtccaaagcggtgcagaagtcaagaagcccggttcctccgtgaaagtgtcctgcaaagcctcgggctacaccttcactaattactggatgcattgggtccgccaggcgcccggacagggattggaatggatggggttcatcacgccgaccaccggatacccggagtacaaccagaagttcaaggacagagtgaccattaccgccgataagtccacctccaccgcttacatggagctctcctcactgcggtccgaagatacagccgtgtactattgtgctcgccggaaagtcggaaagggagtgtactacgccctggactattggggccagggcaccaccgtgaccgtgtcctcgggaggagggggttcgggcggaggcggctccggtggaggcggaagcggagggggcggatcagccattaggatgactcagtcccctttctccctctccgcgagcgtgggcgaccgcgtgacgatcacttgccgggcctcggggaacattcacaactacctggcctggtaccagcagaagccggccaaggcccctaagctgttcatctacaacaccaagacccttgcggacggagtgccatcgagattttccggctcgggctctgggaccgattacactctgactatctcaagcctgcaacctgaggacttcgccacttactactgccagcacttctggagcagcccctggactttcggtggcgggaccaaggtcgaaatcaagaccactaccccagcaccgaggccacccaccccggctcctaccatcgcctcccagcctctgtccctgcgtccggaggcatgtagacccgcagctggtggggccgtgcatacccggggtcttgacttcgcctgcgatatctacatttgggcccctctggctggtacttgcggggtcctgctgctttcactcgtgatcactctttactgtaagcgcggtcggaagaagctgctgtacatctttaagcaacccttcatgaggcctgtgcagactactcaagaggaggacggctgttcatgccggttcccagaggaggaggaaggcggctgcgaactgcgcgtgaaattcagccgcagcgcagatgctccagcctaccagcaggggcagaaccagctctacaacgaactcaatcttggtcggagagaggagtacgacgtgctggacaagcggagaggacgggacccagaaatgggcgggaagccgcgcagaaagaatccccaagagggcctgtacaacgagctccaaaaggataagatggcagaagcctatagcgagattggtatgaaaggggaacgcagaagaggcaaaggccacgacggactgtaccagggactcagcaccgccaccaaggacacctatgacgctcttcacatgcaggccctgccgcctcgg

SEQ ID NO: 1561 - protein, 5 aa, Artificial Sequence
  source: /note="Description of Artificial Sequence: Synthetic peptide"
NYNLH

SEQ ID NO: 1562 - protein, 17 aa, Artificial Sequence
  source: /note="Description of Artificial Sequence: Synthetic peptide"
AIYPGNYDTSYNQKFKG

SEQ ID NO: 1563 - protein, 13 aa, Artificial Sequence
  source: /note="Description of Artificial Sequence: Synthetic peptide"
VDFGHSRYWYFDV

SEQ ID NO: 1564 - protein, 7 aa, Artificial Sequence
  source: /note="Description of Artificial Sequence: Synthetic peptide"
GYTFTNY

SEQ ID NO: 1565 - protein, 6 aa, Artificial Sequence
  source: /note="Description of Artificial Sequence: Synthetic peptide"
YPGNYD

SEQ ID NO: 1566 - protein, 13 aa, Artificial Sequence
  source: /note="Description of Artificial Sequence: Synthetic peptide"
VDFGHSRYWYFDV

SEQ ID NO: 1567 - protein, 8 aa, Artificial Sequence
  source: /note="Description of Artificial Sequence: Synthetic peptide"
GYTFTNYN

SEQ ID NO: 1568 - protein, 8 aa, Artificial Sequence
  source: /note="Description of Artificial Sequence: Synthetic peptide"
IYPGNYDT

SEQ ID NO: 1569 - protein, 15 aa, Artificial Sequence
  source: /note="Description of Artificial Sequence: Synthetic peptide"
ARVDFGHSRYWYFDV

SEQ ID NO: 1570 - protein, 10 aa, Artificial Sequence
  source: /note="Description of Artificial Sequence: Synthetic peptide"
GYTFTNYNLH

SEQ ID NO: 1571 - protein, 17 aa, Artificial Sequence
  source: /note="Description of Artificial Sequence: Synthetic peptide"
AIYPGNYDTSYNQKFKG

SEQ ID NO: 1572 - protein, 13 aa, Artificial Sequence
  source: /note="Description of Artificial Sequence: Synthetic peptide"
VDFGHSRYWYFDV

SEQ ID NO: 1573 - protein, 122 aa, Artificial Sequence; identical to SEQ ID NO: 1375
  source: /note="Description of Artificial Sequence: Synthetic polypeptide"

SEQ ID NO: 1574 - DNA, 366 bp, Artificial Sequence
  source: /note="Description of Artificial Sequence: Synthetic polynucleotide"
caagtccaactcgtccaatccggtgcagaagtcaagaaacccggtgcatccgtgaaagtgtcatgcaaagcctccgggtacaccttcactaactacaacctccactgggtccgccaggccccgggacagggactggagtggatgggggccatctacccgggaaactacgacacttcatacaaccagaagttcaagggcagagtgaccatgactgccgacaagagcacatcgaccgcctacatggaactcagctccctgcgctccgaggatactgccgtctactactgtgcccgggtggacttcggccactcccggtattggtatttcgatgtctggggacagggaaccaccgtgactgtgtccagc

SEQ ID NO: 1575 - protein, 10 aa, Artificial Sequence
  source: /note="Description of Artificial Sequence: Synthetic peptide"
RATSSVSSMN

SEQ ID NO: 1576 - protein, 7 aa, Artificial Sequence
  source: /note="Description of Artificial Sequence: Synthetic peptide"
ATSNLAS

SEQ ID NO: 1577 - protein, 9 aa, Artificial Sequence
  source: /note="Description of Artificial Sequence: Synthetic peptide"
QQWTFNPPT

SEQ ID NO: 1578 - protein, 6 aa, Artificial Sequence
  source: /note="Description of Artificial Sequence: Synthetic peptide"
TSSVSS

SEQ ID NO: 1579 - protein, 3 aa, Artificial Sequence
  source: /note="Description of Artificial Sequence: Synthetic peptide"
ATS

SEQ ID NO: 1580 - protein, 6 aa, Artificial Sequence
  source: /note="Description of Artificial Sequence: Synthetic peptide"
WTFNPP

SEQ ID NO: 1581 - protein, 5 aa, Artificial Sequence
  source: /note="Description of Artificial Sequence: Synthetic peptide"
SSVSS

SEQ ID NO: 1582 - protein, 3 aa, Artificial Sequence
  source: /note="Description of Artificial Sequence: Synthetic peptide"
ATS

SEQ ID NO: 1583 - protein, 9 aa, Artificial Sequence
  source: /note="Description of Artificial Sequence: Synthetic peptide"
QQWTFNPPT

SEQ ID NO: 1584 - protein, 10 aa, Artificial Sequence
  source: /note="Description of Artificial Sequence: Synthetic peptide"
RATSSVSSMN

SEQ ID NO: 1585 - protein, 7 aa, Artificial Sequence
  source: /note="Description of Artificial Sequence: Synthetic peptide"
ATSNLAS

SEQ ID NO: 1586 - protein, 9 aa, Artificial Sequence
  source: /note="Description of Artificial Sequence: Synthetic peptide"
QQWTFNPPT

SEQ ID NO: 1587 - protein, 106 aa, Artificial Sequence
  source: /note="Description of Artificial Sequence: Synthetic polypeptide"
EIVLTQSPATLSLSPGERATLSCRATSSVSSMNWYQQKPGQAPRPLIHATSNLASGIPARFSGSGSGTDYTLTISSLEPEDAAVYYCQQWTFNPPTFGQGTKLEIK

SEQ ID NO: 1588 - DNA, 318 bp, Artificial Sequence
  source: /note="Description of Artificial Sequence: Synthetic polynucleotide"
gaaatcgtgctgacccagtcccctgcgactctgagcctgagccctggggaacgcgccactttgtcatgccgggccacctcctccgtgtcctccatgaactggtaccagcagaagcccggacaggctccgcggccgctgatccatgccacctccaacctggccagcggcattcccgcgaggttttccggctcgggctctggtaccgactacaccctgaccatctcgagccttgagccagaagatgctgcggtgtactactgccaacagtggaccttcaatccgcctacgttcggacaggggaccaagctggagattaag

SEQ ID NO: 1589 - protein, 20 aa, Artificial Sequence
  source: /note="Description of Artificial Sequence: Synthetic peptide"
GGGGSGGGGSGGGGSGGGGS

SEQ ID NO: 1590 - protein, 248 aa, Artificial Sequence
  source: /note="Description of Artificial Sequence: Synthetic polypeptide"
QVQLVQSGAEVKKPGASVKVSCKASGYTFTNYNLHWVRQAPGQGLEWMGAIYPGNYDTSYNQKFKGRVTMTADKSTSTAYMELSSLRSEDTAVYYCARVDFGHSRYWYFDVWGQGTTVTVSSGGGGSGGGGSGGGGSGGGGSEIVLTQSPATLSLSPGERATLSCRATSSVSSMNWYQQKPGQAPRPLIHATSNLASGIPARFSGSGSGTDYTLTISSLEPEDAAVYYCQQWTFNPPTFGQGTKLEIK

SEQ ID NO: 1591 - DNA, 744 bp, Artificial Sequence
  source: /note="Description of Artificial Sequence: Synthetic polynucleotide"
caagtccaactcgtccaatccggtgcagaagtcaagaaacccggtgcatccgtgaaagtgtcatgcaaagcctccgggtacaccttcactaactacaacctccactgggtccgccaggccccgggacagggactggagtggatgggggccatctacccgggaaactacgacacttcatacaaccagaagttcaagggcagagtgaccatgactgccgacaagagcacatcgaccgcctacatggaactcagctccctgcgctccgaggatactgccgtctactactgtgcccgggtggacttcggccactcccggtattggtatttcgatgtctggggacagggaaccaccgtgactgtgtccagcgggggcggaggatcgggtggcggaggttcggggggaggaggatcaggcggcggcggatcggaaatcgtgctgacccagtcccctgcgactctgagcctgagccctggggaacgcgccactttgtcatgccgggccacctcctccgtgtcctccatgaactggtaccagcagaagcccggacaggctccgcggccgctgatccatgccacctccaacctggccagcggcattcccgcgaggttttccggctcgggctctggtaccgactacaccctgaccatctcgagccttgagccagaagatgctgcggtgtactactgccaacagtggaccttcaatccgcctacgttcggacaggggaccaagctggagattaag

SEQ ID NO: 1592 - protein, 492 aa, Artificial Sequence
  source: /note="Description of Artificial Sequence: Synthetic polypeptide"
MALPVTALLLPLALLLHAARPQVQLVQSGAEVKKPGASVKVSCKASGYTFTNYNLHWVRQAPGQGLEWMGAIYPGNYDTSYNQKFKGRVTMTADKSTSTAYMELSSLRSEDTAVYYCARVDFGHSRYWYFDVWGQGTTVTVSSGGGGSGGGGSGGGGSGGGGSEIVLTQSPATLSLSPGERATLSCRATSSVSSMNWYQQKPGQAPRPLIHATSNLASGIPARFSGSGSGTDYTLTISSLEPEDAAVYYCQQWTFNPPTFGQGTKLEIKTTTPAPRPPTPAPTIASQPLSLRPEACRPAAGGAVHTRGLDFACDIYIWAPLAGTCGVLLLSLVITLYCKRGRKKLLYIFKQPFMRPVQTTQEEDGCSCRFPEEEEGGCELRVKFSRSADAPAYQQGQNQLYNELNLGRREEYDVLDKRRGRDPEMGGKPRRKNPQEGLYNELQKDKMAEAYSEIGMKGERRRGKGHDGLYQGLSTATKDTYDALHMQALPPR

SEQ ID NO: 1593 - DNA, 1476 bp, Artificial Sequence
  source: /note="Description of Artificial Sequence: Synthetic polynucleotide"
atggccctccctgtcaccgccctgctgcttccgctggctcttctgctccacgccgctcggccccaagtccaactcgtccaatccggtgcagaagtcaagaaacccggtgcatccgtgaaagtgtcatgcaaagcctccgggtacaccttcactaactacaacctccactgggtccgccaggccccgggacagggactggagtggatgggggccatctacccgggaaactacgacacttcatacaaccagaagttcaagggcagagtgaccatgactgccgacaagagcacatcgaccgcctacatggaactcagctccctgcgctccgaggatactgccgtctactactgtgcccgggtggacttcggccactcccggtattggtatttcgatgtctggggacagggaaccaccgtgactgtgtccagcgggggcggaggatcgggtggcggaggttcggggggaggaggatcaggcggcggcggatcggaaatcgtgctgacccagtcccctgcgactctgagcctgagccctggggaacgcgccactttgtcatgccgggccacctcctccgtgtcctccatgaactggtaccagcagaagcccggacaggctccgcggccgctgatccatgccacctccaacctggccagcggcattcccgcgaggttttccggctcgggctctggtaccgactacaccctgaccatctcgagccttgagccagaagatgctgcggtgtactactgccaacagtggaccttcaatccgcctacgttcggacaggggaccaagctggagattaagaccactaccccagcaccgaggccacccaccccggctcctaccatcgcctcccagcctctgtccctgcgtccggaggcatgtagacccgcagctggtggggccgtgcatacccggggtcttgacttcgcctgcgatatctacatttgggcccctctggctggtacttgcggggtcctgctgctttcactcgtgatcactctttactgtaagcgcggtcggaagaagctgctgtacatctttaagcaacccttcatgaggcctgtgcagactactcaagaggaggacggctgttcatgccggttcccagaggaggaggaaggcggctgcgaactgcgcgtgaaattcagccgcagcgcagatgctccagcctaccagcaggggcagaaccagctctacaacgaactcaatcttggtcggagagaggagtacgacgtgctggacaagcggagaggacgggacccagaaatgggcgggaagccgcgcagaaagaatccccaagagggcctgtacaacgagctccaaaaggataagatggcagaagcctatagcgagattggtatgaaaggggaacgcagaagaggcaaaggccacgacggactgtaccagggactcagcaccgccaccaaggacacctatgacgctcttcacatgcaggccctgccgcctcgg

SEQ ID NO: 1594 - protein, 5 aa, Artificial Sequence
  source: /note="Description of Artificial Sequence: Synthetic peptide"
NYNLH

SEQ ID NO: 1595 - protein, 17 aa, Artificial Sequence
  source: /note="Description of Artificial Sequence: Synthetic peptide"
AIYPGNYDTSYNQKFKG

SEQ ID NO: 1596 - protein, 13 aa, Artificial Sequence
  source: /note="Description of Artificial Sequence: Synthetic peptide"
VDFGHSRYWYFDV

SEQ ID NO: 1597 - protein, 7 aa, Artificial Sequence
  source: /note="Description of Artificial Sequence: Synthetic peptide"
GYTFTNY

SEQ ID NO: 1598 - protein, 6 aa, Artificial Sequence
  source: /note="Description of Artificial Sequence: Synthetic peptide"
YPGNYD

SEQ ID NO: 1599 - protein, 13 aa, Artificial Sequence
  source: /note="Description of Artificial Sequence: Synthetic peptide"
VDFGHSRYWYFDV

SEQ ID NO: 1600 - protein, 8 aa, Artificial Sequence
  source: /note="Description of Artificial Sequence: Synthetic peptide"
GYTFTNYN

SEQ ID NO: 1601 - protein, 8 aa, Artificial Sequence
  source: /note="Description of Artificial Sequence: Synthetic peptide"
IYPGNYDT

SEQ ID NO: 1602 - protein, 15 aa, Artificial Sequence
  source: /note="Description of Artificial Sequence: Synthetic peptide"
ARVDFGHSRYWYFDV

SEQ ID NO: 1603 - protein, 122 aa, Artificial Sequence; identical to SEQ ID NO: 1441
  source: /note="Description of Artificial Sequence: Synthetic polypeptide"

SEQ ID NO: 1604 - DNA, 366 bp, Artificial Sequence
  source: /note="Description of Artificial Sequence: Synthetic polynucleotide"
caagtccaactcgtccagtcgggagcagaagtcaagaagcccggatcatccgtgaaagtgtcctgcaaagcctcaggctacacctttaccaactacaacttgcactgggtcagacaggccccgggacagggcctggagtggatgggcgccatctaccccggaaactatgacacctcgtacaaccagaagttcaagggtcgcgtgactatcacggctgacaagtccactagcaccgcgtacatggaactttcctcactgcggtccgaggatactgcggtgtactactgcgcccgggtggacttcggacactcgagatattggtacttcgatgtctggggacaggggaccaccgtgactgtgtcctcc

SEQ ID NO: 1605 - protein, 10 aa, Artificial Sequence
  source: /note="Description of Artificial Sequence: Synthetic peptide"
RATSSVSSMN

SEQ ID NO: 1606 - protein, 7 aa, Artificial Sequence
  source: /note="Description of Artificial Sequence: Synthetic peptide"
ATSNLAS

SEQ ID NO: 1607 - protein, 9 aa, Artificial Sequence
  source: /note="Description of Artificial Sequence: Synthetic peptide"
QQWTFNPPT

SEQ ID NO: 1608 - protein, 6 aa, Artificial Sequence
  source: /note="Description of Artificial Sequence: Synthetic peptide"
TSSVSS

SEQ ID NO: 1609 - protein, 3 aa, Artificial Sequence
  source: /note="Description of Artificial Sequence: Synthetic peptide"
ATS

SEQ ID NO: 1610 - protein, 6 aa, Artificial Sequence
  source: /note="Description of Artificial Sequence: Synthetic peptide"
WTFNPP

SEQ ID NO: 1611 - protein, 5 aa, Artificial Sequence
  source: /note="Description of Artificial Sequence: Synthetic peptide"
SSVSS

SEQ ID NO: 1612 - protein, 3 aa, Artificial Sequence
  source: /note="Description of Artificial Sequence: Synthetic peptide"
ATS

SEQ ID NO: 1613 - protein, 9 aa, Artificial Sequence
  source: /note="Description of Artificial Sequence: Synthetic peptide"
QQWTFNPPT

SEQ ID NO: 1614 - protein, 10 aa, Artificial Sequence
  source: /note="Description of Artificial Sequence: Synthetic peptide"
RATSSVSSMN

SEQ ID NO: 1615 - protein, 7 aa, Artificial Sequence
  source: /note="Description of Artificial Sequence: Synthetic peptide"
ATSNLAS

SEQ ID NO: 1616 - protein, 9 aa, Artificial Sequence
  source: /note="Description of Artificial Sequence: Synthetic peptide"
QQWTFNPPT

SEQ ID NO: 1617 - protein, 107 aa, Artificial Sequence; identical to SEQ ID NO: 1521
  source: /note="Description of Artificial Sequence: Synthetic polypeptide"

SEQ ID NO: 1618 - DNA, 318 bp, Artificial Sequence
  source: /note="Description of Artificial Sequence: Synthetic polynucleotide"
gaaattgtgctgacccagtctcccgcaaccctgtccctgagccctggagagcgcgccaccctgtcctgccgggccacatcctccgtgtcgtccatgaactggtaccagcagaagcccggccaagccccgaggcctctgattcatgctacctcaaatctggccagcggaatcccggcgcgcttctccggctcgggcagcggtactgactacactctcaccatctcgtccctcgaaccggaggacgccgccgtctactactgtcagcagtggaccttcaacccacctactttcggacaagggaccaagctggagatcaag

SEQ ID NO: 1619 - protein, 19 aa, Artificial Sequence
  source: /note="Description of Artificial Sequence: Synthetic peptide"
GGGSGGGGSGGGGSGGGGS

SEQ ID NO: 1620 - protein, 249 aa, Artificial Sequence; identical to SEQ ID NO: 1524
  source: /note="Description of Artificial Sequence: Synthetic polypeptide"

SEQ ID NO: 1621 - DNA, 744 bp, Artificial Sequence
  source: /note="Description of Artificial Sequence: Synthetic polynucleotide"
caagtccaactcgtccagtcgggagcagaagtcaagaagcccggatcatccgtgaaagtgtcctgcaaagcctcaggctacacctttaccaactacaacttgcactgggtcagacaggccccgggacagggcctggagtggatgggcgccatctaccccggaaactatgacacctcgtacaaccagaagttcaagggtcgcgtgactatcacggctgacaagtccactagcaccgcgtacatggaactttcctcactgcggtccgaggatactgcggtgtactactgcgcccgggtggacttcggacactcgagatattggtacttcgatgtctggggacaggggaccaccgtgactgtgtcctccgggggcggtggcagcgggggaggcggaagcggcggagggggttccgggggtggaggaagcgaaattgtgctgacccagtctcccgcaaccctgtccctgagccctggagagcgcgccaccctgtcctgccgggccacatcctccgtgtcgtccatgaactggtaccagcagaagcccggccaagccccgaggcctctgattcatgctacctcaaatctggccagcggaatcccggcgcgcttctccggctcgggcagcggtactgactacactctcaccatctcgtccctcgaaccggaggacgccgccgtctactactgtcagcagtggaccttcaacccacctactttcggacaagggaccaagctggagatcaag

SEQ ID NO: 1622 - protein, 492 aa, Artificial Sequence
  source: /note="Description of Artificial Sequence: Synthetic polypeptide"
MALPVTALLLPLALLLHAARPQVQLVQSGAEVKKPGSSVKVSCKASGYTFTNYNLHWVRQAPGQGLEWMGAIYPGNYDTSYNQKFKGRVTITADKSTSTAYMELSSLRSEDTAVYYCARVDFGHSRYWYFDVWGQGTTVTVSSGGGGSGGGGSGGGGSGGGGSEIVLTQSPATLSLSPGERATLSCRATSSVSSMNWYQQKPGQAPRPLIHATSNLASGIPARFSGSGSGTDYTLTISSLEPEDAAVYYCQQWTFNPPTFGQGTKLEIKTTTPAPRPPTPAPTIASQPLSLRPEACRPAAGGAVHTRGLDFACDIYIWAPLAGTCGVLLLSLVITLYCKRGRKKLLYIFKQPFMRPVQTTQEEDGCSCRFPEEEEGGCELRVKFSRSADAPAYQQGQNQLYNELNLGRREEYDVLDKRRGRDPEMGGKPRRKNPQEGLYNELQKDKMAEAYSEIGMKGERRRGKGHDGLYQGLSTATKDTYDALHMQALPPR

SEQ ID NO: 1623 - DNA, 1476 bp, Artificial Sequence
  source: /note="Description of Artificial Sequence: Synthetic polynucleotide"
atggccctccctgtcaccgccctgctgcttccgctggctcttctgctccacgccgctcggccccaagtccaactcgtccagtcgggagcagaagtcaagaagcccggatcatccgtgaaagtgtcctgcaaagcctcaggctacacctttaccaactacaacttgcactgggtcagacaggccccgggacagggcctggagtggatgggcgccatctaccccggaaactatgacacctcgtacaaccagaagttcaagggtcgcgtgactatcacggctgacaagtccactagcaccgcgtacatggaactttcctcactgcggtccgaggatactgcggtgtactactgcgcccgggtggacttcggacactcgagatattggtacttcgatgtctggggacaggggaccaccgtgactgtgtcctccgggggcggtggcagcgggggaggcggaagcggcggagggggttccgggggtggaggaagcgaaattgtgctgacccagtctcccgcaaccctgtccctgagccctggagagcgcgccaccctgtcctgccgggccacatcctccgtgtcgtccatgaactggtaccagcagaagcccggccaagccccgaggcctctgattcatgctacctcaaatctggccagcggaatcccggcgcgcttctccggctcgggcagcggtactgactacactctcaccatctcgtccctcgaaccggaggacgccgccgtctactactgtcagcagtggaccttcaacccacctactttcggacaagggaccaagctggagatcaagaccactaccccagcaccgaggccacccaccccggctcctaccatcgcctcccagcctctgtccctgcgtccggaggcatgtagacccgcagctggtggggccgtgcatacccggggtcttgacttcgcctgcgatatctacatttgggcccctctggctggtacttgcggggtcctgctgctttcactcgtgatcactctttactgtaagcgcggtcggaagaagctgctgtacatctttaagcaacccttcatgaggcctgtgcagactactcaagaggaggacggctgttcatgccggttcccagaggaggaggaaggcggctgcgaactgcgcgtgaaattcagccgcagcgcagatgctccagcctaccagcaggggcagaaccagctctacaacgaactcaatcttggtcggagagaggagtacgacgtgctggacaagcggagaggacgggacccagaaatgggcgggaagccgcgcagaaagaatccccaagagggcctgtacaacgagctccaaaaggataagatggcagaagcctatagcgagattggtatgaaaggggaacgcagaagaggcaaaggccacgacggactgtaccagggactcagcaccgccaccaaggacacctatgacgctcttcacatgcaggccctgccgcctcgg

SEQ ID NO: 1624 - protein, 5 aa, Artificial Sequence
  source: /note="Description of Artificial Sequence: Synthetic peptide"
NYNLH

SEQ ID NO: 1625 - protein, 17 aa, Artificial Sequence
  source: /note="Description of Artificial Sequence: Synthetic peptide"
AIYPGNYDTSYNQKFKG

SEQ ID NO: 1626 - protein, 13 aa, Artificial Sequence
  source: /note="Description of Artificial Sequence: Synthetic peptide"
VDFGHSRYWYFDV

SEQ ID NO: 1627 - protein, 7 aa, Artificial Sequence
  source: /note="Description of Artificial Sequence: Synthetic peptide"
GYTFTNY

SEQ ID NO: 1628 - protein, 6 aa, Artificial Sequence
  source: /note="Description of Artificial Sequence: Synthetic peptide"
YPGNYD

SEQ ID NO: 1629 - protein, 13 aa, Artificial Sequence
  source: /note="Description of Artificial Sequence: Synthetic peptide"
VDFGHSRYWYFDV

SEQ ID NO: 1630 - protein, 8 aa, Artificial Sequence
  source: /note="Description of Artificial Sequence: Synthetic peptide"
GYTFTNYN

SEQ ID NO: 1631 - protein, 8 aa, Artificial Sequence
  source: /note="Description of Artificial Sequence: Synthetic peptide"
IYPGNYDT

SEQ ID NO: 1632 - protein, 15 aa, Artificial Sequence
  source: /note="Description of Artificial Sequence: Synthetic peptide"
ARVDFGHSRYWYFDV

SEQ ID NO: 1633 - protein, 10 aa, Artificial Sequence
  source: /note="Description of Artificial Sequence: Synthetic peptide"
GYTFTNYNLH

SEQ ID NO: 1634 - protein, 17 aa, Artificial Sequence
  source: /note="Description of Artificial Sequence: Synthetic peptide"
AIYPGNYDTSYNQKFKG

SEQ ID NO: 1635 - protein, 13 aa, Artificial Sequence
  source: /note="Description of Artificial Sequence: Synthetic peptide"
VDFGHSRYWYFDV

SEQ ID NO: 1636 - protein, 122 aa, Artificial Sequence
  source: /note="Description of Artificial Sequence: Synthetic polypeptide"
QVQLVQSGAEVKKPGSSVKVSCKASGYTFTNYNLHWVRQAPGQGLEWMGAIYPGNYDTSYNQKFKGRVTITADKSTSTAYMELSSLRSEDTAVYYCARVDFGHSRYWYFDVWGQGTTVTVSS

SEQ ID NO: 1637 - DNA, 366 bp, Artificial Sequence; identical to SEQ ID NO: 1604
  source: /note="Description of Artificial Sequence: Synthetic polynucleotide"

SEQ ID NO: 1638 - protein, 10 aa, Artificial Sequence
  source: /note="Description of Artificial Sequence: Synthetic peptide"
RATSSVSSMN

SEQ ID NO: 1639 - protein, 7 aa, Artificial Sequence
  source: /note="Description of Artificial Sequence: Synthetic peptide"
ATSNLAS

SEQ ID NO: 1640 - protein, 9 aa, Artificial Sequence
  source: /note="Description of Artificial Sequence: Synthetic peptide"
QQWTFNPPT

SEQ ID NO: 1641 - protein, 6 aa, Artificial Sequence
  source: /note="Description of Artificial Sequence: Synthetic peptide"
TSSVSS

SEQ ID NO: 1642 - protein, 3 aa, Artificial Sequence
  source: /note="Description of Artificial Sequence: Synthetic peptide"
ATS

SEQ ID NO: 1643 - protein, 6 aa, Artificial Sequence
  source: /note="Description of Artificial Sequence: Synthetic peptide"
WTFNPP

SEQ ID NO: 1644 - protein, 5 aa, Artificial Sequence
  source: /note="Description of Artificial Sequence: Synthetic peptide"
SSVSS

SEQ ID NO: 1645 - protein, 3 aa, Artificial Sequence
  source: /note="Description of Artificial Sequence: Synthetic peptide"
ATS

SEQ ID NO: 1646 - protein, 9 aa, Artificial Sequence
  source: /note="Description of Artificial Sequence: Synthetic peptide"
QQWTFNPPT

SEQ ID NO: 1647 - protein, 10 aa, Artificial Sequence
  source: /note="Description of Artificial Sequence: Synthetic peptide"
RATSSVSSMN

SEQ ID NO: 1648 - protein, 7 aa, Artificial Sequence
  source: /note="Description of Artificial Sequence: Synthetic peptide"
ATSNLAS

SEQ ID NO: 1649 - protein, 9 aa, Artificial Sequence
  source: /note="Description of Artificial Sequence: Synthetic peptide"
QQWTFNPPT

SEQ ID NO: 1650 - protein, 106 aa, Artificial Sequence; identical to SEQ ID NO: 1587
  source: /note="Description of Artificial Sequence: Synthetic polypeptide"

SEQ ID NO: 1651 - DNA, 318 bp, Artificial Sequence; identical to SEQ ID NO: 1618
  source: /note="Description of Artificial Sequence: Synthetic polynucleotide"

SEQ ID NO: 1652 - protein, 20 aa, Artificial Sequence
  source: /note="Description of Artificial Sequence: Synthetic peptide"
GGGGSGGGGSGGGGSGGGGS

SEQ ID NO: 1653 - protein, 248 aa, Artificial Sequence
  source: /note="Description of Artificial Sequence: Synthetic polypeptide"
QVQLVQSGAEVKKPGSSVKVSCKASGYTFTNYNLHWVRQAPGQGLEWMGAIYPGNYDTSYNQKFKGRVTITADKSTSTAYMELSSLRSEDTAVYYCARVDFGHSRYWYFDVWGQGTTVTVSSGGGGSGGGGSGGGGSGGGGSEIVLTQSPATLSLSPGERATLSCRATSSVSSMNWYQQKPGQAPRPLIHATSNLASGIPARFSGSGSGTDYTLTISSLEPEDAAVYYCQQWTFNPPTFGQGTKLEIK

SEQ ID NO: 1654 - DNA, 744 bp, Artificial Sequence
  source: /note="Description of Artificial Sequence: Synthetic polynucleotide"
caagtccaactcgtccaatccggcgcagaagtcaagaaaccaggatcgtccgtgaaagtgtcctgcaaggcgtccgggtacaccttcactaattacaacctccactgggtcagacaggccccaggacagggcctggaatggatgggcgccatctaccctggaaactacgatacctcgtacaaccagaagttcaagggccgcgtgactattaccgccgacaagagcacctccaccgcctatatggaactgtcgtccctgcggtccgaggacactgccgtgtactactgtgcaagggtggacttcggtcactcccggtattggtacttcgacgtctggggacaggggaccactgtgaccgtgtcgtcgggaggcggtggaagcggcggtggcggaagcggaggcggcggatcagggggcggaggaagcgacattcagcttacccagtcaccgtccttcctgagcgcctccgtgggagatcgcgtgaccatcacatgccgcgccacttcctcggtgtcctccatgaactggtaccagcagaagcccggaaaggctcctaagcctctgatccatgcgacctccaacttggcttccggggtgccgtcacggttcagcggcagcggttcaggaactgagtacaccctgactattagctctctccaacccgaggacttcgccacctactactgccagcagtggaccttcaacccgcccacgtttgggcagggtaccaagctggagatcaag

SEQ ID NO: 1655 - protein, 492 aa, Artificial Sequence
  source: /note="Description of Artificial Sequence: Synthetic polypeptide"
MALPVTALLLPLALLLHAARPQVQLVQSGAEVKKPGSSVKVSCKASGYTFTNYNLHWVRQAPGQGLEWMGAIYPGNYDTSYNQKFKGRVTITADKSTSTAYMELSSLRSEDTAVYYCARVDFGHSRYWYFDVWGQGTTVTVSSGGGGSGGGGSGGGGSGGGGSDIQLTQSPSFLSASVGDRVTITCRATSSVSSMNWYQQKPGKAPKPLIHATSNLASGVPSRFSGSGSGTEYTLTISSLQPEDFATYYCQQWTFNPPTFGQGTKLEIKTTTPAPRPPTPAPTIASQPLSLRPEACRPAAGGAVHTRGLDFACDIYIWAPLAGTCGVLLLSLVITLYCKRGRKKLLYIFKQPFMRPVQTTQEEDGCSCRFPEEEEGGCELRVKFSRSADAPAYQQGQNQLYNELNLGRREEYDVLDKRRGRDPEMGGKPRRKNPQEGLYNELQKDKMAEAYSEIGMKGERRRGKGHDGLYQGLSTATKDTYDALHMQALPPR

SEQ ID NO: 1656 - DNA, 1476 bp, Artificial Sequence
  source: /note="Description of Artificial Sequence: Synthetic polynucleotide"
atggccctccctgtcaccgccctgctgcttccgctggctcttctgctccacgccgctcggccccaagtccaactcgtccaatccggcgcagaagtcaagaaaccaggatcgtccgtgaaagtgtcctgcaaggcgtccgggtacaccttcactaattacaacctccactgggtcagacaggccccaggacagggcctggaatggatgggcgccatctaccctggaaactacgatacctcgtacaaccagaagttcaagggccgcgtgactattaccgccgacaagagcacctccaccgcctatatggaactgtcgtccctgcggtccgaggacactgccgtgtactactgtgcaagggtggacttcggtcactcccggtattggtacttcgacgtctggggacaggggaccactgtgaccgtgtcgtcgggaggcggtggaagcggcggtggcggaagcggaggcggcggatcagggggcggaggaagcgacattcagcttacccagtcaccgtccttcctgagcgcctccgtgggagatcgcgtgaccatcacatgccgcgccacttcctcggtgtcctccatgaactggtaccagcagaagcccggaaaggctcctaagcctctgatccatgcgacctccaacttggcttccggggtgccgtcacggttcagcggcagcggttcaggaactgagtacaccctgactattagctctctccaacccgaggacttcgccacctactactgccagcagtggaccttcaacccgcccacgtttgggcagggtaccaagctggagatcaagaccactaccccagcaccgaggccacccaccccggctcctaccatcgcctcccagcctctgtccctgcgtccggaggcatgtagacccgcagctggtggggccgtgcatacccggggtcttgacttcgcctgcgatatctacatttgggcccctctggctggtacttgcggggtcctgctgctttcactcgtgatcactctttactgtaagcgcggtcggaagaagctgctgtacatctttaagcaacccttcatgaggcctgtgcagactactcaagaggaggacggctgttcatgccggttcccagaggaggaggaaggcggctgcgaactgcgcgtgaaattcagccgcagcgcagatgctccagcctaccagcaggggcagaaccagctctacaacgaactcaatcttggtcggagagaggagtacgacgtgctggacaagcggagaggacgggacccagaaatgggcgggaagccgcgcagaaagaatccccaagagggcctgtacaacgagctccaaaaggataagatggcagaagcctatagcgagattggtatgaaaggggaacgcagaagaggcaaaggccacgacggactgtaccagggactcagcaccgccaccaaggacacctatgacgctcttcacatgcaggccctgccgcctcgg

SEQ ID NO: 1657 - protein, 5 aa, Artificial Sequence
  source: /note="Description of Artificial Sequence: Synthetic peptide"
SYNMH

SEQ ID NO: 1658 - protein, 17 aa, Artificial Sequence
  source: /note="Description of Artificial Sequence: Synthetic peptide"
AIYPGNGDTSYNPKFKG

SEQ ID NO: 1659 - protein, 13 aa, Artificial Sequence
  source: /note="Description of Artificial Sequence: Synthetic peptide"
SYFYGSSSWYFDV

SEQ ID NO: 1660 - protein, 7 aa, Artificial Sequence
  source: /note="Description of Artificial Sequence: Synthetic peptide"
GYTFTSY

SEQ ID NO: 1661 - protein, 6 aa, Artificial Sequence
  source: /note="Description of Artificial Sequence: Synthetic peptide"
YPGNGD

SEQ ID NO: 1662 - protein, 13 aa, Artificial Sequence
  source: /note="Description of Artificial Sequence: Synthetic peptide"
SYFYGSSSWYFDV

SEQ ID NO: 1663 - protein, 8 aa, Artificial Sequence
  source: /note="Description of Artificial Sequence: Synthetic peptide"
GYTFTSYN

SEQ ID NO: 1664 - protein, 8 aa, Artificial Sequence
  source: /note="Description of Artificial Sequence: Synthetic peptide"
IYPGNGDT

SEQ ID NO: 1665 - protein, 15 aa, Artificial Sequence
  source: /note="Description of Artificial Sequence: Synthetic peptide"
ARSYFYGSSSWYFDV

SEQ ID NO: 1666 - protein, 10 aa, Artificial Sequence
  source: /note="Description of Artificial Sequence: Synthetic peptide"
GYTFTSYNMH

SEQ ID NO: 1667 - protein, 17 aa, Artificial Sequence
  source: /note="Description of Artificial Sequence: Synthetic peptide"
AIYPGNGDTSYNPKFKG

SEQ ID NO: 1668 - protein, 13 aa, Artificial Sequence
  source: /note="Description of Artificial Sequence: Synthetic peptide"
SYFYGSSSWYFDV

SEQ ID NO: 1669 - protein, 122 aa, Artificial Sequence; identical to SEQ ID NO: 1408
  source: /note="Description of Artificial Sequence: Synthetic polypeptide"

SEQ ID NO: 1670 - DNA, 366 bp, Artificial Sequence
  source: /note="Description of Artificial Sequence: Synthetic polynucleotide"
caagtccaactcgtccagtcaggagcagaagtcaagaaacctggagcttccgtgaaagtgtcgtgcaaggcctccggctacaccttcacctcttacaacatgcactgggtcagacaggcccctggtcaaggactggaatggatgggagcgatctacccgggcaacggagacacttcgtacaaccccaagttcaagggacgggtcactatgaccgccgataagagcacgcgcaccgcgtacatggaactgagcagcctgcgctccgaggacactgccgtgtattactgcgcgaggagctacttctacggatcatcgtcgtggtacttcgacgtctggggccagggcaccaccgtgaccgtgtcatcc

SEQ ID NO: 1671 - protein, 10 aa, Artificial Sequence
  source: /note="Description of Artificial Sequence: Synthetic peptide"
RASSSVSSMH

SEQ ID NO: 1672 - protein, 7 aa, Artificial Sequence
  source: /note="Description of Artificial Sequence: Synthetic peptide"
ATSNLAS

SEQ ID NO: 1673 - protein, 9 aa, Artificial Sequence
  source: /note="Description of Artificial Sequence: Synthetic peptide"
QQWIFNPPT

SEQ ID NO: 1674 - protein, 6 aa, Artificial Sequence
  source: /note="Description of Artificial Sequence: Synthetic peptide"
SSSVSS

SEQ ID NO: 1675 - protein, 3 aa, Artificial Sequence
  source: /note="Description of Artificial Sequence: Synthetic peptide"
ATS

SEQ ID NO: 1676 - protein, 6 aa, Artificial Sequence
  source: /note="Description of Artificial Sequence: Synthetic peptide"
WIFNPP

SEQ ID NO: 1677 - protein, 5 aa, Artificial Sequence
  source: /note="Description of Artificial Sequence: Synthetic peptide"
SSVSS

SEQ ID NO: 1678 - protein, 3 aa, Artificial Sequence
  source: /note="Description of Artificial Sequence: Synthetic peptide"
ATS

SEQ ID NO: 1679 - protein, 9 aa, Artificial Sequence
  source: /note="Description of Artificial Sequence: Synthetic peptide"
QQWIFNPPT

SEQ ID NO: 1680 - protein, 10 aa, Artificial Sequence
  source: /note="Description of Artificial Sequence: Synthetic peptide"
RASSSVSSMH

SEQ ID NO: 1681 - protein, 7 aa, Artificial Sequence
  source: /note="Description of Artificial Sequence: Synthetic peptide"
ATSNLAS

SEQ ID NO: 1682 - protein, 9 aa, Artificial Sequence
  source: /note="Description of Artificial Sequence: Synthetic peptide"
QQWIFNPPT

SEQ ID NO: 1683 - protein, 106 aa, Artificial Sequence
  source: /note="Description of Artificial Sequence: Synthetic polypeptide"
DIQLTQSPSFLSASVGDRVTITCRASSSVSSMHWYQQKPGKAPKPLIFATSNLASGVPSRFSGSGSGTEYTLTISSLQPEDFATYYCQQWIFNPPTFGGGTKVEIK

SEQ ID NO: 1684 - DNA, 318 bp, Artificial Sequence
  source: /note="Description of Artificial Sequence: Synthetic polynucleotide"
gatattcagctgacccagagcccgtcattcctgtccgcctccgtgggagacagagtgaccatcacttgtcgggccagctcctcggtgtcctccatgcattggtatcagcagaagcctgggaaggctcccaagcccctcatcttcgccacatcaaatcttgcctccggggtgccaagccggttctccgggagcggctccggtactgagtacactctgaccatttcctccttgcaacccgaggactttgccacctactactgccagcagtggatctttaacccgccgaccttcggaggaggaaccaaagtggagatcaag

SEQ ID NO: 1685 - protein, 20 aa, Artificial Sequence
  source: /note="Description of Artificial Sequence: Synthetic peptide"
GGGGSGGGGSGGGGSGGGGS

SEQ ID NO: 1686 - protein, 248 aa, Artificial Sequence
  source: /note="Description of Artificial Sequence: Synthetic polypeptide"
QVQLVQSGAEVKKPGASVKVSCKASGYTFTSYNMHWVRQAPGQGLEWMGAIYPGNGDTSYNPKFKGRVTMTADKSTRTAYMELSSLRSEDTAVYYCARSYFYGSSSWYFDVWGQGTTVTVSSGGGGSGGGGSGGGGSGGGGSDIQLTQSPSFLSASVGDRVTITCRASSSVSSMHWYQQKPGKAPKPLIFATSNLASGVPSRFSGSGSGTEYTLTISSLQPEDFATYYCQQWIFNPPTFGGGTKVEIK

SEQ ID NO: 1687 - DNA, 744 bp, Artificial Sequence
  source: /note="Description of Artificial Sequence: Synthetic polynucleotide"
caagtccaactcgtccagtcaggagcagaagtcaagaaacctggagcttccgtgaaagtgtcgtgcaaggcctccggctacaccttcacctcttacaacatgcactgggtcagacaggcccctggtcaaggactggaatggatgggagcgatctacccgggcaacggagacacttcgtacaaccccaagttcaagggacgggtcactatgaccgccgataagagcacgcgcaccgcgtacatggaactgagcagcctgcgctccgaggacactgccgtgtattactgcgcgaggagctacttctacggatcatcgtcgtggtacttcgacgtctggggccagggcaccaccgtgaccgtgtcatccggtggcggaggatcggggggcggaggaagcggcggggggggctccggcggtggaggctcggatattcagctgacccagagcccgtcattcctgtccgcctccgtgggagacagagtgaccatcacttgtcgggccagctcctcggtgtcctccatgcattggtatcagcagaagcctgggaaggctcccaagcccctcatcttcgccacatcaaatcttgcctccggggtgccaagccggttctccgggagcggctccggtactgagtacactctgaccatttcctccttgcaacccgaggactttgccacctactactgccagcagtggatctttaacccgccgaccttcggaggaggaaccaaagtggagatcaag

SEQ ID NO: 1688 - protein, 492 aa, Artificial Sequence
  source: /note="Description of Artificial Sequence: Synthetic polypeptide"
MALPVTALLLPLALLLHAARPQVQLVQSGAEVKKPGASVKVSCKASGYTFTSYNMHWVRQAPGQGLEWMGAIYPGNGDTSYNPKFKGRVTMTADKSTRTAYMELSSLRSEDTAVYYCARSYFYGSSSWYFDVWGQGTTVTVSSGGGGSGGGGSGGGGSGGGGSDIQLTQSPSFLSASVGDRVTITCRASSSVSSMHWYQQKPGKAPKPLIFATSNLASGVPSRFSGSGSGTEYTLTISSLQPEDFATYYCQQWIFNPPTFGGGTKVEIKTTTPAPRPPTPAPTIASQPLSLRPEACRPAAGGAVHTRGLDFACDIYIWAPLAGTCGVLLLSLVITLYCKRGRKKLLYIFKQPFMRPVQTTQEEDGCSCRFPEEEEGGCELRVKFSRSADAPAYQQGQNQLYNELNLGRREEYDVLDKRRGRDPEMGGKPRRKNPQEGLYNELQKDKMAEAYSEIGMKGERRRGKGHDGLYQGLSTATKDTYDALHMQALPPR

SEQ ID NO: 1689 - DNA, 1476 bp, Artificial Sequence
  source: /note="Description of Artificial Sequence: Synthetic polynucleotide"
atggccctccctgtcaccgccctgctgcttccgctggctcttctgctccacgccgctcggccccaagtccaactcgtccagtcaggagcagaagtcaagaaacctggagcttccgtgaaagtgtcgtgcaaggcctccggctacaccttcacctcttacaacatgcactgggtcagacaggcccctggtcaaggactggaatggatgggagcgatctacccgggcaacggagacacttcgtacaaccccaagttcaagggacgggtcactatgaccgccgataagagcacgcgcaccgcgtacatggaactgagcagcctgcgctccgaggacactgccgtgtattactgcgcgaggagctacttctacggatcatcgtcgtggtacttcgacgtctggggccagggcaccaccgtgaccgtgtcatccggtggcggaggatcggggggcggaggaagcggcggggggggctccggcggtggaggctcggatattcagctgacccagagcccgtcattcctgtccgcctccgtgggagacagagtgaccatcacttgtcgggccagctcctcggtgtcctccatgcattggtatcagcagaagcctgggaaggctcccaagcccctcatcttcgccacatcaaatcttgcctccggggtgccaagccggttctccgggagcggctccggtactgagtacactctgaccatttcctccttgcaacccgaggactttgccacctactactgccagcagtggatctttaacccgccgaccttcggaggaggaaccaaagtggagatcaagaccactaccccagcaccgaggccacccaccccggctcctaccatcgcctcccagcctctgtccctgcgtccggaggcatgtagacccgcagctggtggggccgtgcatacccggggtcttgacttcgcctgcgatatctacatttgggcccctctggctggtacttgcggggtcctgctgctttcactcgtgatcactctttactgtaagcgcggtcggaagaagctgctgtacatctttaagcaacccttcatgaggcctgtgcagactactcaagaggaggacggctgttcatgccggttcccagaggaggaggaaggcggctgcgaactgcgcgtgaaattcagccgcagcgcagatgctccagcctaccagcaggggcagaaccagctctacaacgaactcaatcttggtcggagagaggagtacgacgtgctggacaagcggagaggacgggacccagaaatgggcgggaagccgcgcagaaagaatccccaagagggcctgtacaacgagctccaaaaggataagatggcagaagcctatagcgagattggtatgaaaggggaacgcagaagaggcaaaggccacgacggactgtaccagggactcagcaccgccaccaaggacacctatgacgctcttcacatgcaggccctgccgcctcgg

SEQ ID NO: 1690 - protein, 5 aa, Artificial Sequence
  source: /note="Description of Artificial Sequence: Synthetic peptide"
SYNMH

SEQ ID NO: 1691 - protein, 17 aa, Artificial Sequence
  source: /note="Description of Artificial Sequence: Synthetic peptide"
AIYPGNGDTSYNPKFKG

SEQ ID NO: 1692 - protein, 13 aa, Artificial Sequence
  source: /note="Description of Artificial Sequence: Synthetic peptide"
SYFYGSSSWYFDV

SEQ ID NO: 1693 - protein, 7 aa, Artificial Sequence
  source: /note="Description of Artificial Sequence: Synthetic peptide"
GYTFTSY

SEQ ID NO: 1694 - protein, 6 aa, Artificial Sequence
  source: /note="Description of Artificial Sequence: Synthetic peptide"
YPGNGD

SEQ ID NO: 1695 - protein, 13 aa, Artificial Sequence
  source: /note="Description of Artificial Sequence: Synthetic peptide"
SYFYGSSSWYFDV

SEQ ID NO: 1696 - protein, 8 aa, Artificial Sequence
  source: /note="Description of Artificial Sequence: Synthetic peptide"
GYTFTSYN

SEQ ID NO: 1697 - protein, 8 aa, Artificial Sequence
  source: /note="Description of Artificial Sequence: Synthetic peptide"
IYPGNGDT

SEQ ID NO: 1698 - protein, 15 aa, Artificial Sequence
  source: /note="Description of Artificial Sequence: Synthetic peptide"
ARSYFYGSSSWYFDV

SEQ ID NO: 1699 - protein, 10 aa, Artificial Sequence
  source: /note="Description of Artificial Sequence: Synthetic peptide"
GYTFTSYNMH

SEQ ID NO: 1700 - protein, 17 aa, Artificial Sequence
  source: /note="Description of Artificial Sequence: Synthetic peptide"
AIYPGNGDTSYNPKFKG

SEQ ID NO: 1701 - protein, 13 aa, Artificial Sequence
  source: /note="Description of Artificial Sequence: Synthetic peptide"
SYFYGSSSWYFDV

SEQ ID NO: 1702 - protein, 122 aa, Artificial Sequence
  source: /note="Description of Artificial Sequence: Synthetic polypeptide"
QVQLVQSGAEVKKPGSSVKVSCKASGYTFTSYNMHWVRQAPGQGLEWMGAIYPGNGDTSYNPKFKGRVTITADKSTRTAYMELSSLRSEDTAVYYCARSYFYGSSSWYFDVWGQGTTVTVSS

SEQ ID NO: 1703 - DNA, 366 bp, Artificial Sequence
  source: /note="Description of Artificial Sequence: Synthetic polynucleotide"
caagtgcaactcgtccagtccggtgcagaagtcaagaagcctggttcatcggtgaaagtgtcctgcaaagcgtcgggctacaccttcacctcgtacaacatgcactgggtccgccaggcccccggacaaggactggaatggatgggtgctatctaccccggaaacggagataccagctacaaccccaagttcaagggacgcgtgaccattactgccgacaagtccacaagaaccgcctacatggaactgtccagcctgagatccgaggacactgcggtgtactactgtgcgaggtcctacttctacgggtcctcctcttggtacttcgacgtctggggacagggcactactgtgaccgtgtccagc

SEQ ID NO: 1704 - protein, 10 aa, Artificial Sequence
  source: /note="Description of Artificial Sequence: Synthetic peptide"
RASSSVSSMH

SEQ ID NO: 1705 - protein, 7 aa, Artificial Sequence
  source: /note="Description of Artificial Sequence: Synthetic peptide"
ATSNLAS

SEQ ID NO: 1706 - protein, 9 aa, Artificial Sequence
  source: /note="Description of Artificial Sequence: Synthetic peptide"
QQWIFNPPT

SEQ ID NO: 1707 - protein, 6 aa, Artificial Sequence
  source: /note="Description of Artificial Sequence: Synthetic peptide"
SSSVSS

SEQ ID NO: 1708 - protein, 3 aa, Artificial Sequence
  source: /note="Description of Artificial Sequence: Synthetic peptide"
ATS

SEQ ID NO: 1709 - protein, 6 aa, Artificial Sequence
  source: /note="Description of Artificial Sequence: Synthetic peptide"
WIFNPP

SEQ ID NO: 1710 - protein, 5 aa, Artificial Sequence
  source: /note="Description of Artificial Sequence: Synthetic peptide"
SSVSS

SEQ ID NO: 1711 - protein, 3 aa, Artificial Sequence
  source: /note="Description of Artificial Sequence: Synthetic peptide"
ATS

SEQ ID NO: 1712 - protein, 9 aa, Artificial Sequence
  source: /note="Description of Artificial Sequence: Synthetic peptide"
QQWIFNPPT

SEQ ID NO: 1713 - protein, 10 aa, Artificial Sequence
  source: /note="Description of Artificial Sequence: Synthetic peptide"
RASSSVSSMH

SEQ ID NO: 1714 - protein, 7 aa, Artificial Sequence
  source: /note="Description of Artificial Sequence: Synthetic peptide"
ATSNLAS

SEQ ID NO: 1715 - protein, 9 aa, Artificial Sequence
  source: /note="Description of Artificial Sequence: Synthetic peptide"
QQWIFNPPT

SEQ ID NO: 1716 - protein, 106 aa, Artificial Sequence; identical to SEQ ID NO: 1422
  source: /note="Description of Artificial Sequence: Synthetic polypeptide"

SEQ ID NO: 1717 - DNA, 318 bp, Artificial Sequence
  source: /note="Description of Artificial Sequence: Synthetic polynucleotide"
gagatcgtgctgacgcagtcgccggccaccctgagcctttcaccgggagaacgcgccactctgtcatgccgggccagcagctccgtgtcctccatgcattggtaccagcagaagccggggcaggccccgcggcctctcatcttcgccacctccaatctggcctccggcatccctgctcggtttagcggaagcggcagcggaactgactataccttgaccatctcctcgctggaaccagaggatgcagccgtgtactattgccagcagtggatcttcaacccgccaaccttcggcggcggcaccaaggtcgagattaag

SEQ ID NO: 1718 - protein, 20 aa, Artificial Sequence
  source: /note="Description of Artificial Sequence: Synthetic peptide"
GGGGSGGGGSGGGGSGGGGS

SEQ ID NO: 1719 - protein, 248 aa, Artificial Sequence
  source: /note="Description of Artificial Sequence: Synthetic polypeptide"
QVQLVQSGAEVKKPGSSVKVSCKASGYTFTSYNMHWVRQAPGQGLEWMGAIYPGNGDTSYNPKFKGRVTITADKSTRTAYMELSSLRSEDTAVYYCARSYFYGSSSWYFDVWGQGTTVTVSSGGGGSGGGGSGGGGSGGGGSEIVLTQSPATLSLSPGERATLSCRASSSVSSMHWYQQKPGQAPRPLIFATSNLASGIPARFSGSGSGTDYTLTISSLEPEDAAVYYCQQWIFNPPTFGGGTKVEIK

SEQ ID NO: 1720 - DNA, 744 bp, Artificial Sequence
  source: /note="Description of Artificial Sequence: Synthetic polynucleotide"
caagtgcaactcgtccagtccggtgcagaagtcaagaagcctggttcatcggtgaaagtgtcctgcaaagcgtcgggctacaccttcacctcgtacaacatgcactgggtccgccaggcccccggacaaggactggaatggatgggtgctatctaccccggaaacggagataccagctacaaccccaagttcaagggacgcgtgaccattactgccgacaagtccacaagaaccgcctacatggaactgtccagcctgagatccgaggacactgcggtgtactactgtgcgaggtcctacttctacgggtcctcctcttggtacttcgacgtctggggacagggcactactgtgaccgtgtccagcgggggaggcggtagcggggggggtggatcgggcggcggcggatcaggaggaggagggtccgagatcgtgctgacgcagtcgccggccaccctgagcctttcaccgggagaacgcgccactctgtcatgccgggccagcagctccgtgtcctccatgcattggtaccagcagaagccggggcaggccccgcggcctctcatcttcgccacctccaatctggcctccggcatccctgctcggtttagcggaagcggcagcggaactgactataccttgaccatctcctcgctggaaccagaggatgcagccgtgtactattgccagcagtggatcttcaacccgccaaccttcggcggcggcaccaaggtcgagattaag

SEQ ID NO: 1721 - protein, 492 aa, Artificial Sequence
  source: /note="Description of Artificial Sequence: Synthetic polypeptide"
MALPVTALLLPLALLLHAARPQVQLVQSGAEVKKPGSSVKVSCKASGYTFTSYNMHWVRQAPGQGLEWMGAIYPGNGDTSYNPKFKGRVTITADKSTRTAYMELSSLRSEDTAVYYCARSYFYGSSSWYFDVWGQGTTVTVSSGGGGSGGGGSGGGGSGGGGSEIVLTQSPATLSLSPGERATLSCRASSSVSSMHWYQQKPGQAPRPLIFATSNLASGIPARFSGSGSGTDYTLTISSLEPEDAAVYYCQQWIFNPPTFGGGTKVEIKTTTPAPRPPTPAPTIASQPLSLRPEACRPAAGGAVHTRGLDFACDIYIWAPLAGTCGVLLLSLVITLYCKRGRKKLLYIFKQPFMRPVQTTQEEDGCSCRFPEEEEGGCELRVKFSRSADAPAYQQGQNQLYNELNLGRREEYDVLDKRRGRDPEMGGKPRRKNPQEGLYNELQKDKMAEAYSEIGMKGERRRGKGHDGLYQGLSTATKDTYDALHMQALPPR

SEQ ID NO: 1722 - DNA, 1476 bp, Artificial Sequence
  source: /note="Description of Artificial Sequence: Synthetic polynucleotide"
atggccctccctgtcaccgccctgctgcttccgctggctcttctgctccacgccgctcggccccaagtgcaactcgtccagtccggtgcagaagtcaagaagcctggttcatcggtgaaagtgtcctgcaaagcgtcgggctacaccttcacctcgtacaacatgcactgggtccgccaggcccccggacaaggactggaatggatgggtgctatctaccccggaaacggagataccagctacaaccccaagttcaagggacgcgtgaccattactgccgacaagtccacaagaaccgcctacatggaactgtccagcctgagatccgaggacactgcggtgtactactgtgcgaggtcctacttctacgggtcctcctcttggtacttcgacgtctggggacagggcactactgtgaccgtgtccagcgggggaggcggtagcggggggggtggatcgggcggcggcggatcaggaggaggagggtccgagatcgtgctgacgcagtcgccggccaccctgagcctttcaccgggagaacgcgccactctgtcatgccgggccagcagctccgtgtcctccatgcattggtaccagcagaagccggggcaggccccgcggcctctcatcttcgccacctccaatctggcctccggcatccctgctcggtttagcggaagcggcagcggaactgactataccttgaccatctcctcgctggaaccagaggatgcagccgtgtactattgccagcagtggatcttcaacccgccaaccttcggcggcggcaccaaggtcgagattaagaccactaccccagcaccgaggccacccaccccggctcctaccatcgcctcccagcctctgtccctgcgtccggaggcatgtagacccgcagctggtggggccgtgcatacccggggtcttgacttcgcctgcgatatctacatttgggcccctctggctggtacttgcggggtcctgctgctttcactcgtgatcactctttactgtaagcgcggtcggaagaagctgctgtacatctttaagcaacccttcatgaggcctgtgcagactactcaagaggaggacggctgttcatgccggttcccagaggaggaggaaggcggctgcgaactgcgcgtgaaattcagccgcagcgcagatgctccagcctaccagcaggggcagaaccagctctacaacgaactcaatcttggtcggagagaggagtacgacgtgctggacaagcggagaggacgggacccagaaatgggcgggaagccgcgcagaaagaatccccaagagggcctgtacaacgagctccaaaaggataagatggcagaagcctatagcgagattggtatgaaaggggaacgcagaagaggcaaaggccacgacggactgtaccagggactcagcaccgccaccaaggacacctatgacgctcttcacatgcaggccctgccgcctcgg

SEQ ID NO: 1723 - protein, 5 aa, Artificial Sequence
  source: /note="Description of Artificial Sequence: Synthetic peptide"
SYNMH

SEQ ID NO: 1724 - protein, 17 aa, Artificial Sequence
  source: /note="Description of Artificial Sequence: Synthetic peptide"
AIYPGNGDTSYNPKFKG

SEQ ID NO: 1725 - protein, 13 aa, Artificial Sequence
  source: /note="Description of Artificial Sequence: Synthetic peptide"
SYFYGSSSWYFDV

SEQ ID NO: 1726 - protein, 7 aa, Artificial Sequence
  source: /note="Description of Artificial Sequence: Synthetic peptide"
GYTFTSY

SEQ ID NO: 1727 - protein, 6 aa, Artificial Sequence
  source: /note="Description of Artificial Sequence: Synthetic peptide"
YPGNGD

SEQ ID NO: 1728 - protein, 13 aa, Artificial Sequence
  source: /note="Description of Artificial Sequence: Synthetic peptide"
SYFYGSSSWYFDV

SEQ ID NO: 1729 - protein, 8 aa, Artificial Sequence
  source: /note="Description of Artificial Sequence: Synthetic peptide"
GYTFTSYN

SEQ ID NO: 1730 - protein, 8 aa, Artificial Sequence
  source: /note="Description of Artificial Sequence: Synthetic peptide"
IYPGNGDT

SEQ ID NO: 1731 - protein, 15 aa, Artificial Sequence
  source: /note="Description of Artificial Sequence: Synthetic peptide"
ARSYFYGSSSWYFDV

SEQ ID NO: 1732 - protein, 10 aa, Artificial Sequence
  source: /note="Description of Artificial Sequence: Synthetic peptide"
GYTFTSYNMH

SEQ ID NO: 1733 - protein, 17 aa, Artificial Sequence
  source: /note="Description of Artificial Sequence: Synthetic peptide"
AIYPGNGDTSYNPKFKG

SEQ ID NO: 1734 - protein, 13 aa, Artificial Sequence
  source: /note="Description of Artificial Sequence: Synthetic peptide"
SYFYGSSSWYFDV

SEQ ID NO: 1735 - protein, 122 aa, Artificial Sequence; identical to SEQ ID NO: 1702
  source: /note="Description of Artificial Sequence: Synthetic polypeptide"

SEQ ID NO: 1736 - DNA, 366 bp, Artificial Sequence
  source: /note="Description of Artificial Sequence: Synthetic polynucleotide"
caagtgcaactcgtccagtccggtgcagaagtcaagaagccaggttcctcggtgaaagtgtcctgcaaagcctcgggttacaccttcacctcgtacaatatgcactgggtccgccaagctccgggacaaggcctggaatggatgggagcgatctaccccggaaacggcgacacgtcctacaacccgaagttcaagggaagagtgaccatcaccgccgacaagtccacccgcaccgcgtacatggagcttagcagcctgcggagcgaggacactgccgtgtattactgcgcccggtcctacttctatggatcatcctcgtggtacttcgatgtctggggccaggggaccaccgtgaccgtgtccagc

SEQ ID NO: 1737 - protein, 10 aa, Artificial Sequence
  source: /note="Description of Artificial Sequence: Synthetic peptide"
RASSSVSSMH

SEQ ID NO: 1738 - protein, 7 aa, Artificial Sequence
  source: /note="Description of Artificial Sequence: Synthetic peptide"
ATSNLAS

SEQ ID NO: 1739 - protein, 9 aa, Artificial Sequence
  source: /note="Description of Artificial Sequence: Synthetic peptide"
QQWIFNPPT

SEQ ID NO: 1740 - protein, 6 aa, Artificial Sequence
  source: /note="Description of Artificial Sequence: Synthetic peptide"
SSSVSS

SEQ ID NO: 1741 - protein, 3 aa, Artificial Sequence
  source: /note="Description of Artificial Sequence: Synthetic peptide"
ATS

SEQ ID NO: 1742 - protein, 6 aa, Artificial Sequence
  source: /note="Description of Artificial Sequence: Synthetic peptide"
WIFNPP

SEQ ID NO: 1743 - protein, 5 aa, Artificial Sequence
  source: /note="Description of Artificial Sequence: Synthetic peptide"
SSVSS

SEQ ID NO: 1744 - protein, 3 aa, Artificial Sequence
  source: /note="Description of Artificial Sequence: Synthetic peptide"
ATS

SEQ ID NO: 1745 - protein, 9 aa, Artificial Sequence
  source: /note="Description of Artificial Sequence: Synthetic peptide"
QQWIFNPPT

SEQ ID NO: 1746 - protein, 10 aa, Artificial Sequence
  source: /note="Description of Artificial Sequence: Synthetic peptide"
RASSSVSSMH

SEQ ID NO: 1747 - protein, 7 aa, Artificial Sequence
  source: /note="Description of Artificial Sequence: Synthetic peptide"
ATSNLAS

SEQ ID NO: 1748 - protein, 9 aa, Artificial Sequence
  source: /note="Description of Artificial Sequence: Synthetic peptide"
QQWIFNPPT

SEQ ID NO: 1749 - protein, 106 aa, Artificial Sequence; identical to SEQ ID NO: 1683
  source: /note="Description of Artificial Sequence: Synthetic polypeptide"

SEQ ID NO: 1750 - DNA, 318 bp, Artificial Sequence
  source: /note="Description of Artificial Sequence: Synthetic polynucleotide"
gatatccagctgacccagagcccttccttcctgtccgcttccgtgggagacagagtcactattacttgtcgggcctcctcatccgtgtcatccatgcactggtaccagcagaagccgggaaaggccccaaagcccttgatctttgccacttccaacctggcatccggcgtgccctcgaggttctccgggagcggttcagggaccgagtacactctgaccattagcagcctccagcctgaggactttgccacctactactgccagcagtggattttcaacccgcctacattcggagggggcactaaggtcgaaatcaag

SEQ ID NO: 1751 - protein, 20 aa, Artificial Sequence
  source: /note="Description of Artificial Sequence: Synthetic peptide"
GGGGSGGGGSGGGGSGGGGS

SEQ ID NO: 1752 - protein, 248 aa, Artificial Sequence
  source: /note="Description of Artificial Sequence: Synthetic polypeptide"
QVQLVQSGAEVKKPGSSVKVSCKASGYTFTSYNMHWVRQAPGQGLEWMGAIYPGNGDTSYNPKFKGRVTITADKSTRTAYMELSSLRSEDTAVYYCARSYFYGSSSWYFDVWGQGTTVTVSSGGGGSGGGGSGGGGSGGGGSDIQLTQSPSFLSASVGDRVTITCRASSSVSSMHWYQQKPGKAPKPLIFATSNLASGVPSRFSGSGSGTEYTLTISSLQPEDFATYYCQQWIFNPPTFGGGTKVEIK

SEQ ID NO: 1753 - DNA, 744 bp, Artificial Sequence
  source: /note="Description of Artificial Sequence: Synthetic polynucleotide"
caagtgcaactcgtccagtccggtgcagaagtcaagaagccaggttcctcggtgaaagtgtcctgcaaagcctcgggttacaccttcacctcgtacaatatgcactgggtccgccaagctccgggacaaggcctggaatggatgggagcgatctaccccggaaacggcgacacgtcctacaacccgaagttcaagggaagagtgaccatcaccgccgacaagtccacccgcaccgcgtacatggagcttagcagcctgcggagcgaggacactgccgtgtattactgcgcccggtcctacttctatggatcatcctcgtggtacttcgatgtctggggccaggggaccaccgtgaccgtgtccagcggtggcggaggcagcggcggaggagggtctggaggaggcggctcggggggagggggctcggatatccagctgacccagagcccttccttcctgtccgcttccgtgggagacagagtcactattacttgtcgggcctcctcatccgtgtcatccatgcactggtaccagcagaagccgggaaaggccccaaagcccttgatctttgccacttccaacctggcatccggcgtgccctcgaggttctccgggagcggttcagggaccgagtacactctgaccattagcagcctccagcctgaggactttgccacctactactgccagcagtggattttcaacccgcctacattcggagggggcactaaggtcgaaatcaag

SEQ ID NO: 1754 - protein, 492 aa, Artificial Sequence
  source: /note="Description of Artificial Sequence: Synthetic polypeptide"
MALPVTALLLPLALLLHAARPQVQLVQSGAEVKKPGSSVKVSCKASGYTFTSYNMHWVRQAPGQGLEWMGAIYPGNGDTSYNPKFKGRVTITADKSTRTAYMELSSLRSEDTAVYYCARSYFYGSSSWYFDVWGQGTTVTVSSGGGGSGGGGSGGGGSGGGGSDIQLTQSPSFLSASVGDRVTITCRASSSVSSMHWYQQKPGKAPKPLIFATSNLASGVPSRFSGSGSGTEYTLTISSLQPEDFATYYCQQWIFNPPTFGGGTKVEIKTTTPAPRPPTPAPTIASQPLSLRPEACRPAAGGAVHTRGLDFACDIYIWAPLAGTCGVLLLSLVITLYCKRGRKKLLYIFKQPFMRPVQTTQEEDGCSCRFPEEEEGGCELRVKFSRSADAPAYQQGQNQLYNELNLGRREEYDVLDKRRGRDPEMGGKPRRKNPQEGLYNELQKDKMAEAYSEIGMKGERRRGKGHDGLYQGLSTATKDTYDALHMQALPPR

SEQ ID NO: 1755 - DNA, 1476 bp, Artificial Sequence
  source: /note="Description of Artificial Sequence: Synthetic polynucleotide"
atggccctccctgtcaccgccctgctgcttccgctggctcttctgctccacgccgctcggccccaagtgcaactcgtccagtccggtgcagaagtcaagaagccaggttcctcggtgaaagtgtcctgcaaagcctcgggttacaccttcacctcgtacaatatgcactgggtccgccaagctccgggacaaggcctggaatggatgggagcgatctaccccggaaacggcgacacgtcctacaacccgaagttcaagggaagagtgaccatcaccgccgacaagtccacccgcaccgcgtacatggagcttagcagcctgcggagcgaggacactgccgtgtattactgcgcccggtcctacttctatggatcatcctcgtggtacttcgatgtctggggccaggggaccaccgtgaccgtgtccagcggtggcggaggcagcggcggaggagggtctggaggaggcggctcggggggagggggctcggatatccagctgacccagagcccttccttcctgtccgcttccgtgggagacagagtcactattacttgtcgggcctcctcatccgtgtcatccatgcactggtaccagcagaagccgggaaaggccccaaagcccttgatctttgccacttccaacctggcatccggcgtgccctcgaggttctccgggagcggttcagggaccgagtacactctgaccattagcagcctccagcctgaggactttgccacctactactgccagcagtggattttcaacccgcctacattcggagggggcactaaggtcgaaatcaagaccactaccccagcaccgaggccacccaccccggctcctaccatcgcctcccagcctctgtccctgcgtccggaggcatgtagacccgcagctggtggggccgtgcatacccggggtcttgacttcgcctgcgatatctacatttgggcccctctggctggtacttgcggggtcctgctgctttcactcgtgatcactctttactgtaagcgcggtcggaagaagctgctgtacatctttaagcaacccttcatgaggcctgtgcagactactcaagaggaggacggctgttcatgccggttcccagaggaggaggaaggcggctgcgaactgcgcgtgaaattcagccgcagcgcagatgctccagcctaccagcaggggcagaaccagctctacaacgaactcaatcttggtcggagagaggagtacgacgtgctggacaagcggagaggacgggacccagaaatgggcgggaagccgcgcagaaagaatccccaagagggcctgtacaacgagctccaaaaggataagatggcagaagcctatagcgagattggtatgaaaggggaacgcagaagaggcaaaggccacgacggactgtaccagggactcagcaccgccaccaaggacacctatgacgctcttcacatgcaggccctgccgcctcgg

SEQ ID NO: 1756 - protein, 5 aa, Artificial Sequence
  source: /note="Description of Artificial Sequence: Synthetic peptide"
RYNMH

SEQ ID NO: 1757 - protein, 17 aa, Artificial Sequence
  source: /note="Description of Artificial Sequence: Synthetic peptide"
AIYPGNGDTSYSQKFKG

SEQ ID NO: 1758 - protein, 13 aa, Artificial Sequence
  source: /note="Description of Artificial Sequence: Synthetic peptide"
SFFYGSSDWYFDV

SEQ ID NO: 1759 - protein, 7 aa, Artificial Sequence
  source: /note="Description of Artificial Sequence: Synthetic peptide"
GYTFTRY

SEQ ID NO: 1760 - protein, 6 aa, Artificial Sequence
  source: /note="Description of Artificial Sequence: Synthetic peptide"
YPGNGD

SEQ ID NO: 1761 - protein, 13 aa, Artificial Sequence
  source: /note="Description of Artificial Sequence: Synthetic peptide"
SFFYGSSDWYFDV

SEQ ID NO: 1762 - protein, 8 aa, Artificial Sequence
  source: /note="Description of Artificial Sequence: Synthetic peptide"
GYTFTRYN

SEQ ID NO: 1763 - protein, 8 aa, Artificial Sequence
  source: /note="Description of Artificial Sequence: Synthetic peptide"
IYPGNGDT

SEQ ID NO: 1764 - protein, 15 aa, Artificial Sequence
  source: /note="Description of Artificial Sequence: Synthetic peptide"
ARSFFYGSSDWYFDV

SEQ ID NO: 1765 - protein, 10 aa, Artificial Sequence
  source: /note="Description of Artificial Sequence: Synthetic peptide"
GYTFTRYNMH

SEQ ID NO: 1766 - protein, 17 aa, Artificial Sequence
  source: /note="Description of Artificial Sequence: Synthetic peptide"
AIYPGNGDTSYSQKFKG

SEQ ID NO: 1767 - protein, 13 aa, Artificial Sequence
  source: /note="Description of Artificial Sequence: Synthetic peptide"
SFFYGSSDWYFDV

SEQ ID NO: 1768 - protein, 122 aa, Artificial Sequence
  source: /note="Description of Artificial Sequence: Synthetic polypeptide"
QVQLVQSGAEVKKPGASVKVSCKASGYTFTRYNMHWVRQAPGQRLEWMGAIYPGNGDTSYSQKFKGRVTITADKSASTAYMELSSLRSEDTAVYYCARSFFYGSSDWYFDVWGQGTTVTVSS

SEQ ID NO: 1769 - DNA, 366 bp, Artificial Sequence
  source: /note="Description of Artificial Sequence: Synthetic polynucleotide"
caagtccaactcgtccagtcaggagcagaagtcaagaaaccaggagcatccgtgaaagtgtcgtgcaaagcctctggctacaccttcacccggtacaacatgcactgggtcagacaggccccgggacagcggctcgagtggatgggtgccatctaccccggcaacggggacacctcctactcccaaaagttcaagggtcgcgtgaccatcacggcggataagtcggccagcactgcgtacatggaattgtcatccctgcgctccgaggataccgccgtgtattactgcgcgcggtccttcttctacggctcctccgattggtacttcgacgtctggggacagggaactaccgtgaccgtgtcctcc

SEQ ID NO: 1770 - protein, 10 aa, Artificial Sequence
  source: /note="Description of Artificial Sequence: Synthetic peptide"
RASSSVNNMH

SEQ ID NO: 1771 - protein, 7 aa, Artificial Sequence
  source: /note="Description of Artificial Sequence: Synthetic peptide"
ATSNLAS

SEQ ID NO: 1772 - protein, 9 aa, Artificial Sequence
  source: /note="Description of Artificial Sequence: Synthetic peptide"
QQWIFNPPT

SEQ ID NO: 1773 - protein, 6 aa, Artificial Sequence
  source: /note="Description of Artificial Sequence: Synthetic peptide"
SSSVNN

SEQ ID NO: 1774 - protein, 3 aa, Artificial Sequence
  source: /note="Description of Artificial Sequence: Synthetic peptide"
ATS

SEQ ID NO: 1775 - protein, 6 aa, Artificial Sequence
  source: /note="Description of Artificial Sequence: Synthetic peptide"
WIFNPP

SEQ ID NO: 1776 - protein, 5 aa, Artificial Sequence
  source: /note="Description of Artificial Sequence: Synthetic peptide"
SSVNN

SEQ ID NO: 1777 - protein, 3 aa, Artificial Sequence
  source: /note="Description of Artificial Sequence: Synthetic peptide"
ATS

SEQ ID NO: 1778 - protein, 9 aa, Artificial Sequence
  source: /note="Description of Artificial Sequence: Synthetic peptide"
QQWIFNPPT

SEQ ID NO: 1779 - protein, 10 aa, Artificial Sequence
  source: /note="Description of Artificial Sequence: Synthetic peptide"
RASSSVNNMH

SEQ ID NO: 1780 - protein, 7 aa, Artificial Sequence
  source: /note="Description of Artificial Sequence: Synthetic peptide"
ATSNLAS

SEQ ID NO: 1781 - protein, 9 aa, Artificial Sequence
  source: /note="Description of Artificial Sequence: Synthetic peptide"
QQWIFNPPT

SEQ ID NO: 1782 - protein, 106 aa, Artificial Sequence
  source: /note="Description of Artificial Sequence: Synthetic polypeptide"
EIVLTQSPDFQSVTPKEKVTITCRASSSVNNMHWYQQKPDQSPKPLIYATSNLASGVPSRFSGSGSGTDYTLTINSLEAEDAATYYCQQWIFNPPTFGQGTKLEIK

SEQ ID NO: 1783 - DNA, 318 bp, Artificial Sequence
  source: /note="Description of Artificial Sequence: Synthetic polynucleotide"
gaaatcgtgctgactcagtcgccggacttccaaagcgtgaccccaaaggagaaggtcaccatcacctgtagagcctcatcgtccgtgaacaatatgcactggtaccagcagaagccggaccagtcccctaagcccctgatctacgccacttccaacctggcctccggcgtgccgtcgaggttcagcggctcgggcagcgggaccgactacaccctgaccatcaacagccttgaagctgaggacgccgctacctactactgccagcagtggattttcaaccctcccacatttggacagggcactaagctggagattaag

SEQ ID NO: 1784 - protein, 20 aa, Artificial Sequence
  source: /note="Description of Artificial Sequence: Synthetic peptide"
GGGGSGGGGSGGGGSGGGGS

SEQ ID NO: 1785 - protein, 248 aa, Artificial Sequence
  source: /note="Description of Artificial Sequence: Synthetic polypeptide"
QVQLVQSGAEVKKPGASVKVSCKASGYTFTRYNMHWVRQAPGQRLEWMGAIYPGNGDTSYSQKFKGRVTITADKSASTAYMELSSLRSEDTAVYYCARSFFYGSSDWYFDVWGQGTTVTVSSGGGGSGGGGSGGGGSGGGGSEIVLTQSPDFQSVTPKEKVTITCRASSSVNNMHWYQQKPDQSPKPLIYATSNLASGVPSRFSGSGSGTDYTLTINSLEAEDAATYYCQQWIFNPPTFGQGTKLEIK

SEQ ID NO: 1786 - DNA, 744 bp, Artificial Sequence
  source: /note="Description of Artificial Sequence: Synthetic polynucleotide"
caagtccaactcgtccagtcaggagcagaagtcaagaaaccaggagcatccgtgaaagtgtcgtgcaaagcctctggctacaccttcacccggtacaacatgcactgggtcagacaggccccgggacagcggctcgagtggatgggtgccatctaccccggcaacggggacacctcctactcccaaaagttcaagggtcgcgtgaccatcacggcggataagtcggccagcactgcgtacatggaattgtcatccctgcgctccgaggataccgccgtgtattactgcgcgcggtccttcttctacggctcctccgattggtacttcgacgtctggggacagggaactaccgtgaccgtgtcctccgggggtggcgggagcggagggggcggaagcgggggtggaggatcaggaggcggaggctccgaaatcgtgctgactcagtcgccggacttccaaagcgtgaccccaaaggagaaggtcaccatcacctgtagagcctcatcgtccgtgaacaatatgcactggtaccagcagaagccggaccagtcccctaagcccctgatctacgccacttccaacctggcctccggcgtgccgtcgaggttcagcggctcgggcagcgggaccgactacaccctgaccatcaacagccttgaagctgaggacgccgctacctactactgccagcagtggattttcaaccctcccacatttggacagggcactaagctggagattaag

SEQ ID NO: 1787 - protein, 492 aa, Artificial Sequence
  source: /note="Description of Artificial Sequence: Synthetic polypeptide"
MALPVTALLLPLALLLHAARPQVQLVQSGAEVKKPGASVKVSCKASGYTFTRYNMHWVRQAPGQRLEWMGAIYPGNGDTSYSQKFKGRVTITADKSASTAYMELSSLRSEDTAVYYCARSFFYGSSDWYFDVWGQGTTVTVSSGGGGSGGGGSGGGGSGGGGSEIVLTQSPDFQSVTPKEKVTITCRASSSVNNMHWYQQKPDQSPKPLIYATSNLASGVPSRFSGSGSGTDYTLTINSLEAEDAATYYCQQWIFNPPTFGQGTKLEIKTTTPAPRPPTPAPTIASQPLSLRPEACRPAAGGAVHTRGLDFACDIYIWAPLAGTCGVLLLSLVITLYCKRGRKKLLYIFKQPFMRPVQTTQEEDGCSCRFPEEEEGGCELRVKFSRSADAPAYQQGQNQLYNELNLGRREEYDVLDKRRGRDPEMGGKPRRKNPQEGLYNELQKDKMAEAYSEIGMKGERRRGKGHDGLYQGLSTATKDTYDALHMQALPPR

SEQ ID NO: 1788 - DNA, 1476 bp, Artificial Sequence
  source: /note="Description of Artificial Sequence: Synthetic polynucleotide"
atggccctccctgtcaccgccctgctgcttccgctggctcttctgctccacgccgctcggccccaagtccaactcgtccagtcaggagcagaagtcaagaaaccaggagcatccgtgaaagtgtcgtgcaaagcctctggctacaccttcacccggtacaacatgcactgggtcagacaggccccgggacagcggctcgagtggatgggtgccatctaccccggcaacggggacacctcctactcccaaaagttcaagggtcgcgtgaccatcacggcggataagtcggccagcactgcgtacatggaattgtcatccctgcgctccgaggataccgccgtgtattactgcgcgcggtccttcttctacggctcctccgattggtacttcgacgtctggggacagggaactaccgtgaccgtgtcctccgggggtggcgggagcggagggggcggaagcgggggtggaggatcaggaggcggaggctccgaaatcgtgctgactcagtcgccggacttccaaagcgtgaccccaaaggagaaggtcaccatcacctgtagagcctcatcgtccgtgaacaatatgcactggtaccagcagaagccggaccagtcccctaagcccctgatctacgccacttccaacctggcctccggcgtgccgtcgaggttcagcggctcgggcagcgggaccgactacaccctgaccatcaacagccttgaagctgaggacgccgctacctactactgccagcagtggattttcaaccctcccacatttggacagggcactaagctggagattaagaccactaccccagcaccgaggccacccaccccggctcctaccatcgcctcccagcctctgtccctgcgtccggaggcatgtagacccgcagctggtggggccgtgcatacccggggtcttgacttcgcctgcgatatctacatttgggcccctctggctggtacttgcggggtcctgctgctttcactcgtgatcactctttactgtaagcgcggtcggaagaagctgctgtacatctttaagcaacccttcatgaggcctgtgcagactactcaagaggaggacggctgttcatgccggttcccagaggaggaggaaggcggctgcgaactgcgcgtgaaattcagccgcagcgcagatgctccagcctaccagcaggggcagaaccagctctacaacgaactcaatcttggtcggagagaggagtacgacgtgctggacaagcggagaggacgggacccagaaatgggcgggaagccgcgcagaaagaatccccaagagggcctgtacaacgagctccaaaaggataagatggcagaagcctatagcgagattggtatgaaaggggaacgcagaagaggcaaaggccacgacggactgtaccagggactcagcaccgccaccaaggacacctatgacgctcttcacatgcaggccctgccgcctcgg

SEQ ID NO: 1789 - protein, 5 aa, Artificial Sequence
  source: /note="Description of Artificial Sequence: Synthetic peptide"
RYNMH

SEQ ID NO: 1790 - protein, 17 aa, Artificial Sequence
  source: /note="Description of Artificial Sequence: Synthetic peptide"
AIYPGNGDTSYSQKFKG

SEQ ID NO: 1791 - protein, 13 aa, Artificial Sequence
  source: /note="Description of Artificial Sequence: Synthetic peptide"
SFFYGSSDWYFDV

SEQ ID NO: 1792 - protein, 7 aa, Artificial Sequence
  source: /note="Description of Artificial Sequence: Synthetic peptide"
GYTFTRY

SEQ ID NO: 1793 - protein, 6 aa, Artificial Sequence
  source: /note="Description of Artificial Sequence: Synthetic peptide"
YPGNGD

SEQ ID NO: 1794 - protein, 13 aa, Artificial Sequence
  source: /note="Description of Artificial Sequence: Synthetic peptide"
SFFYGSSDWYFDV

SEQ ID NO: 1795 - protein, 8 aa, Artificial Sequence
  source: /note="Description of Artificial Sequence: Synthetic peptide"
GYTFTRYN

SEQ ID NO: 1796 - protein, 8 aa, Artificial Sequence
  source: /note="Description of Artificial Sequence: Synthetic peptide"
IYPGNGDT

SEQ ID NO: 1797 - protein, 15 aa, Artificial Sequence
  source: /note="Description of Artificial Sequence: Synthetic peptide"
ARSFFYGSSDWYFDV

SEQ ID NO: 1798 - protein, 10 aa, Artificial Sequence
  source: /note="Description of Artificial Sequence: Synthetic peptide"
GYTFTRYNMH

SEQ ID NO: 1799 - protein, 17 aa, Artificial Sequence
  source: /note="Description of Artificial Sequence: Synthetic peptide"
AIYPGNGDTSYSQKFKG

SEQ ID NO: 1800 - protein, 13 aa, Artificial Sequence
  source: /note="Description of Artificial Sequence: Synthetic peptide"
SFFYGSSDWYFDV

SEQ ID NO: 1801 - protein, 122 aa, Artificial Sequence; identical to SEQ ID NO: 1768
  source: /note="Description of Artificial Sequence: Synthetic polypeptide"

SEQ ID NO: 1802 - DNA, 366 bp, Artificial Sequence
  source: /note="Description of Artificial Sequence: Synthetic polynucleotide"
caagtgcaactcgtccaatccggcgcggaagtcaaaaagcctggagcctccgtcaaagtgtcctgcaaggcctccggttacactttcactcgctacaacatgcattgggtgcggcaggccccgggacagcgcctggaatggatgggcgcaatctaccccggcaacggagacacctcctattcccaaaagttcaagggaagggtcacaatcacggccgacaagagcgcctcaactgcctacatggagctgagcagcctcagatccgaagataccgcggtgtactactgcgcccggagcttcttctacggttcgtctgattggtactttgacgtctggggccagggaaccaccgtgaccgtgtcgtcc

SEQ ID NO: 1803 - protein, 10 aa, Artificial Sequence
  source: /note="Description of Artificial Sequence: Synthetic peptide"
RASSSVNNMH

SEQ ID NO: 1804 - protein, 7 aa, Artificial Sequence
  source: /note="Description of Artificial Sequence: Synthetic peptide"
ATSNLAS

SEQ ID NO: 1805 - protein, 9 aa, Artificial Sequence
  source: /note="Description of Artificial Sequence: Synthetic peptide"
QQWIFNPPT

SEQ ID NO: 1806 - protein, 6 aa, Artificial Sequence
  source: /note="Description of Artificial Sequence: Synthetic peptide"
SSSVNN

SEQ ID NO: 1807 - protein, 3 aa, Artificial Sequence
  source: /note="Description of Artificial Sequence: Synthetic peptide"
ATS

SEQ ID NO: 1808 - protein, 6 aa, Artificial Sequence
  source: /note="Description of Artificial Sequence: Synthetic peptide"
WIFNPP

SEQ ID NO: 1809 - protein, 5 aa, Artificial Sequence
  source: /note="Description of Artificial Sequence: Synthetic peptide"
SSVNN

SEQ ID NO: 1810 - protein, 3 aa, Artificial Sequence
  source: /note="Description of Artificial Sequence: Synthetic peptide"
ATS

SEQ ID NO: 1811 - protein, 9 aa, Artificial Sequence
  source: /note="Description of Artificial Sequence: Synthetic peptide"
QQWIFNPPT

SEQ ID NO: 1812 - protein, 10 aa, Artificial Sequence
  source: /note="Description of Artificial Sequence: Synthetic peptide"
RASSSVNNMH

SEQ ID NO: 1813 - protein, 7 aa, Artificial Sequence
  source: /note="Description of Artificial Sequence: Synthetic peptide"
ATSNLAS

SEQ ID NO: 1814 - protein, 9 aa, Artificial Sequence
  source: /note="Description of Artificial Sequence: Synthetic peptide"
QQWIFNPPT

SEQ ID NO: 1815 - protein, 106 aa, Artificial Sequence
  source: /note="Description of Artificial Sequence: Synthetic polypeptide"
DIQLTQSPSFLSASVGDRVTITCRASSSVNNMHWYQQKPGKAPKPLIYATSNLASGVPSRFSGSGSGTEYTLTISSLQPEDFATYYCQQWIFNPPTFGQGTKLEIK

SEQ ID NO: 1816 - DNA, 318 bp, Artificial Sequence
  source: /note="Description of Artificial Sequence: Synthetic polynucleotide"
gacatccagcttacccagtcgccatcattcctgtccgcatcagtgggtgatcgcgtgaccattacctgtcgggcgtcctcctccgtgaacaacatgcactggtaccagcagaagccggggaaggctcccaagcctctgatctacgccactagcaatttggccagcggcgtgccttcgagattctcggggtcgggctcaggaaccgagtataccctgaccatttcctccctccaaccggaggactttgctacttactactgccagcagtggattttcaaccccccgactttcggacagggcaccaagctggaaatcaag

SEQ ID NO: 1817 - protein, 20 aa, Artificial Sequence
  source: /note="Description of Artificial Sequence: Synthetic peptide"
GGGGSGGGGSGGGGSGGGGS

SEQ ID NO: 1818 - protein, 248 aa, Artificial Sequence
  source: /note="Description of Artificial Sequence: Synthetic polypeptide"
QVQLVQSGAEVKKPGASVKVSCKASGYTFTRYNMHWVRQAPGQRLEWMGAIYPGNGDTSYSQKFKGRVTITADKSASTAYMELSSLRSEDTAVYYCARSFFYGSSDWYFDVWGQGTTVTVSSGGGGSGGGGSGGGGSGGGGSDIQLTQSPSFLSASVGDRVTITCRASSSVNNMHWYQQKPGKAPKPLIYATSNLASGVPSRFSGSGSGTEYTLTISSLQPEDFATYYCQQWIFNPPTFGQGTKLEIK

SEQ ID NO: 1819 - DNA, 744 bp, Artificial Sequence
  source: /note="Description of Artificial Sequence: Synthetic polynucleotide"
caagtgcaactcgtccaatccggcgcggaagtcaaaaagcctggagcctccgtcaaagtgtcctgcaaggcctccggttacactttcactcgctacaacatgcattgggtgcggcaggccccgggacagcgcctggaatggatgggcgcaatctaccccggcaacggagacacctcctattcccaaaagttcaagggaagggtcacaatcacggccgacaagagcgcctcaactgcctacatggagctgagcagcctcagatccgaagataccgcggtgtactactgcgcccggagcttcttctacggttcgtctgattggtactttgacgtctggggccagggaaccaccgtgaccgtgtcgtccggtggcggagggagcggtggaggaggctccgggggaggaggcagcggcgggggaggcagcgacatccagcttacccagtcgccatcattcctgtccgcatcagtgggtgatcgcgtgaccattacctgtcgggcgtcctcctccgtgaacaacatgcactggtaccagcagaagccggggaaggctcccaagcctctgatctacgccactagcaatttggccagcggcgtgccttcgagattctcggggtcgggctcaggaaccgagtataccctgaccatttcctccctccaaccggaggactttgctacttactactgccagcagtggattttcaaccccccgactttcggacagggcaccaagctggaaatcaag

SEQ ID NO: 1820 - protein, 492 aa, Artificial Sequence
  source: /note="Description of Artificial Sequence: Synthetic polypeptide"
MALPVTALLLPLALLLHAARPQVQLVQSGAEVKKPGASVKVSCKASGYTFTRYNMHWVRQAPGQRLEWMGAIYPGNGDTSYSQKFKGRVTITADKSASTAYMELSSLRSEDTAVYYCARSFFYGSSDWYFDVWGQGTTVTVSSGGGGSGGGGSGGGGSGGGGSDIQLTQSPSFLSASVGDRVTITCRASSSVNNMHWYQQKPGKAPKPLIYATSNLASGVPSRFSGSGSGTEYTLTISSLQPEDFATYYCQQWIFNPPTFGQGTKLEIKTTTPAPRPPTPAPTIASQPLSLRPEACRPAAGGAVHTRGLDFACDIYIWAPLAGTCGVLLLSLVITLYCKRGRKKLLYIFKQPFMRPVQTTQEEDGCSCRFPEEEEGGCELRVKFSRSADAPAYQQGQNQLYNELNLGRREEYDVLDKRRGRDPEMGGKPRRKNPQEGLYNELQKDKMAEAYSEIGMKGERRRGKGHDGLYQGLSTATKDTYDALHMQALPPR

SEQ ID NO: 1821 - DNA, 1476 bp, Artificial Sequence
  source: /note="Description of Artificial Sequence: Synthetic polynucleotide"
atggccctccctgtcaccgccctgctgcttccgctggctcttctgctccacgccgctcggccccaagtgcaactcgtccaatccggcgcggaagtcaaaaagcctggagcctccgtcaaagtgtcctgcaaggcctccggttacactttcactcgctacaacatgcattgggtgcggcaggccccgggacagcgcctggaatggatgggcgcaatctaccccggcaacggagacacctcctattcccaaaagttcaagggaagggtcacaatcacggccgacaagagcgcctcaactgcctacatggagctgagcagcctcagatccgaagataccgcggtgtactactgcgcccggagcttcttctacggttcgtctgattggtactttgacgtctggggccagggaaccaccgtgaccgtgtcgtccggtggcggagggagcggtggaggaggctccgggggaggaggcagcggcgggggaggcagcgacatccagcttacccagtcgccatcattcctgtccgcatcagtgggtgatcgcgtgaccattacctgtcgggcgtcctcctccgtgaacaacatgcactggtaccagcagaagccggggaaggctcccaagcctctgatctacgccactagcaatttggccagcggcgtgccttcgagattctcggggtcgggctcaggaaccgagtataccctgaccatttcctccctccaaccggaggactttgctacttactactgccagcagtggattttcaaccccccgactttcggacagggcaccaagctggaaatcaagaccactaccccagcaccgaggccacccaccccggctcctaccatcgcctcccagcctctgtccctgcgtccggaggcatgtagacccgcagctggtggggccgtgcatacccggggtcttgacttcgcctgcgatatctacatttgggcccctctggctggtacttgcggggtcctgctgctttcactcgtgatcactctttactgtaagcgcggtcggaagaagctgctgtacatctttaagcaacccttcatgaggcctgtgcagactactcaagaggaggacggctgttcatgccggttcccagaggaggaggaaggcggctgcgaactgcgcgtgaaattcagccgcagcgcagatgctccagcctaccagcaggggcagaaccagctctacaacgaactcaatcttggtcggagagaggagtacgacgtgctggacaagcggagaggacgggacccagaaatgggcgggaagccgcgcagaaagaatccccaagagggcctgtacaacgagctccaaaaggataagatggcagaagcctatagcgagattggtatgaaaggggaacgcagaagaggcaaaggccacgacggactgtaccagggactcagcaccgccaccaaggacacctatgacgctcttcacatgcaggccctgccgcctcgg

SEQ ID NO: 1822 - protein, 5 aa, Artificial Sequence
  source: /note="Description of Artificial Sequence: Synthetic peptide"
RYNMH

SEQ ID NO: 1823 - protein, 17 aa, Artificial Sequence
  source: /note="Description of Artificial Sequence: Synthetic peptide"
AIYPGNGDTSYSQKFKG

SEQ ID NO: 1824 - protein, 13 aa, Artificial Sequence
  source: /note="Description of Artificial Sequence: Synthetic peptide"
SFFYGSSDWYFDV

SEQ ID NO: 1825 - protein, 7 aa, Artificial Sequence
  source: /note="Description of Artificial Sequence: Synthetic peptide"
GYTFTRY

SEQ ID NO: 1826 - protein, 6 aa, Artificial Sequence
  source: /note="Description of Artificial Sequence: Synthetic peptide"
YPGNGD

SEQ ID NO: 1827 - protein, 13 aa, Artificial Sequence
  source: /note="Description of Artificial Sequence: Synthetic peptide"
SFFYGSSDWYFDV

SEQ ID NO: 1828 - protein, 8 aa, Artificial Sequence
  source: /note="Description of Artificial Sequence: Synthetic peptide"
GYTFTRYN

SEQ ID NO: 1829 - protein, 8 aa, Artificial Sequence
  source: /note="Description of Artificial Sequence: Synthetic peptide"
IYPGNGDT

SEQ ID NO: 1830 - protein, 15 aa, Artificial Sequence
  source: /note="Description of Artificial Sequence: Synthetic peptide"
ARSFFYGSSDWYFDV

SEQ ID NO: 1831 - protein, 10 aa, Artificial Sequence
  source: /note="Description of Artificial Sequence: Synthetic peptide"
GYTFTRYNMH

SEQ ID NO: 1832 - protein, 17 aa, Artificial Sequence
  source: /note="Description of Artificial Sequence: Synthetic peptide"
AIYPGNGDTSYSQKFKG

SEQ ID NO: 1833 - protein, 13 aa, Artificial Sequence
  source: /note="Description of Artificial Sequence: Synthetic peptide"
SFFYGSSDWYFDV

SEQ ID NO: 1834 - protein, 122 aa, Artificial Sequence
  source: /note="Description of Artificial Sequence: Synthetic polypeptide"
QVQLVQSGAEVKKPGSSVKVSCKASGYTFTRYNMHWVRQAPGQGLEWMGAIYPGNGDTSYSQKFKGRVTITADKSTSTAYMELSSLRSEDTAVYYCARSFFYGSSDWYFDVWGQGTTVTVSS

SEQ ID NO: 1835 - DNA, 366 bp, Artificial Sequence
  source: /note="Description of Artificial Sequence: Synthetic polynucleotide"
caagtgcaactcgtccagtccggtgcagaagtcaagaagcctggttcctccgtgaaagtgtcctgcaaagcgtctggctacaccttcacccggtacaatatgcactgggtcagacaggcgcccggacagggcctggagtggatgggggccatctaccctgggaacggcgacactagctactcccaaaagttcaagggccgcgtgacgattaccgccgacaagtcaaccagcactgcctatatggagctgagctcgcttcggagcgaagataccgccgtgtactactgcgctcggagcttcttctacgggtcctcggattggtacttcgacgtctggggccaggggactactgtgaccgtgtcctcc

SEQ ID NO: 1836 - protein, 10 aa, Artificial Sequence
  source: /note="Description of Artificial Sequence: Synthetic peptide"
RASSSVNNMH

SEQ ID NO: 1837 - protein, 7 aa, Artificial Sequence
  source: /note="Description of Artificial Sequence: Synthetic peptide"
ATSNLAS

SEQ ID NO: 1838 - protein, 9 aa, Artificial Sequence
  source: /note="Description of Artificial Sequence: Synthetic peptide"
QQWIFNPPT

SEQ ID NO: 1839 - protein, 6 aa, Artificial Sequence
  source: /note="Description of Artificial Sequence: Synthetic peptide"
SSSVNN

SEQ ID NO: 1840 - protein, 3 aa, Artificial Sequence
  source: /note="Description of Artificial Sequence: Synthetic peptide"
ATS

SEQ ID NO: 1841 - protein, 6 aa, Artificial Sequence
  source: /note="Description of Artificial Sequence: Synthetic peptide"
WIFNPP

SEQ ID NO: 1842 - protein, 5 aa, Artificial Sequence
  source: /note="Description of Artificial Sequence: Synthetic peptide"
SSVNN

SEQ ID NO: 1843 - protein, 3 aa, Artificial Sequence
  source: /note="Description of Artificial Sequence: Synthetic peptide"
ATS

SEQ ID NO: 1844 - protein, 9 aa, Artificial Sequence
  source: /note="Description of Artificial Sequence: Synthetic peptide"
QQWIFNPPT

SEQ ID NO: 1845 - protein, 10 aa, Artificial Sequence
  source: /note="Description of Artificial Sequence: Synthetic peptide"
RASSSVNNMH

SEQ ID NO: 1846 - protein, 7 aa, Artificial Sequence
  source: /note="Description of Artificial Sequence: Synthetic peptide"
ATSNLAS

SEQ ID NO: 1847 - protein, 9 aa, Artificial Sequence
  source: /note="Description of Artificial Sequence: Synthetic peptide"
QQWIFNPPT

SEQ ID NO: 1848 - protein, 106 aa, Artificial Sequence; identical to SEQ ID NO: 1782
  source: /note="Description of Artificial Sequence: Synthetic polypeptide"

SEQ ID NO: 1849 - DNA, 318 bp, Artificial Sequence
  source: /note="Description of Artificial Sequence: Synthetic polynucleotide"
gaaatcgtgctgacccagtccccggactttcagtcagtgactcccaaggagaaggtcaccattacttgtcgcgcctcctcctcggtgaacaacatgcactggtaccagcagaagccggaccagtccccgaagcccctgatctatgctacctccaacttggcgtccggcgtgccgtcaaggttcagcggatcgggttccgggacagactacaccctgactattaactcactcgaggccgaggatgccgccacctactactgccagcagtggatcttcaaccctccaaccttcggacaaggaaccaagctggaaatcaag

SEQ ID NO: 1850 - protein, 20 aa, Artificial Sequence
  source: /note="Description of Artificial Sequence: Synthetic peptide"
GGGGSGGGGSGGGGSGGGGS

SEQ ID NO: 1851 - protein, 248 aa, Artificial Sequence
  source: /note="Description of Artificial Sequence: Synthetic polypeptide"
QVQLVQSGAEVKKPGSSVKVSCKASGYTFTRYNMHWVRQAPGQGLEWMGAIYPGNGDTSYSQKFKGRVTITADKSTSTAYMELSSLRSEDTAVYYCARSFFYGSSDWYFDVWGQGTTVTVSSGGGGSGGGGSGGGGSGGGGSEIVLTQSPDFQSVTPKEKVTITCRASSSVNNMHWYQQKPDQSPKPLIYATSNLASGVPSRFSGSGSGTDYTLTINSLEAEDAATYYCQQWIFNPPTFGQGTKLEIK

SEQ ID NO: 1852 - DNA, 744 bp, Artificial Sequence
  source: /note="Description of Artificial Sequence: Synthetic polynucleotide"
caagtgcaactcgtccagtccggtgcagaagtcaagaagcctggttcctccgtgaaagtgtcctgcaaagcgtctggctacaccttcacccggtacaatatgcactgggtcagacaggcgcccggacagggcctggagtggatgggggccatctaccctgggaacggcgacactagctactcccaaaagttcaagggccgcgtgacgattaccgccgacaagtcaaccagcactgcctatatggagctgagctcgcttcggagcgaagataccgccgtgtactactgcgctcggagcttcttctacgggtcctcggattggtacttcgacgtctggggccaggggactactgtgaccgtgtcctccgggggaggaggatcgggcggaggcggttcgggaggcggcggaagcggaggcggaggttcagaaatcgtgctgacccagtccccggactttcagtcagtgactcccaaggagaaggtcaccattacttgtcgcgcctcctcctcggtgaacaacatgcactggtaccagcagaagccggaccagtccccgaagcccctgatctatgctacctccaacttggcgtccggcgtgccgtcaaggttcagcggatcgggttccgggacagactacaccctgactattaactcactcgaggccgaggatgccgccacctactactgccagcagtggatcttcaaccctccaaccttcggacaaggaaccaagctggaaatcaag

SEQ ID NO: 1853 - protein, 492 aa, Artificial Sequence
  source: /note="Description of Artificial Sequence: Synthetic polypeptide"
MALPVTALLLPLALLLHAARPQVQLVQSGAEVKKPGSSVKVSCKASGYTFTRYNMHWVRQAPGQGLEWMGAIYPGNGDTSYSQKFKGRVTITADKSTSTAYMELSSLRSEDTAVYYCARSFFYGSSDWYFDVWGQGTTVTVSSGGGGSGGGGSGGGGSGGGGSEIVLTQSPDFQSVTPKEKVTITCRASSSVNNMHWYQQKPDQSPKPLIYATSNLASGVPSRFSGSGSGTDYTLTINSLEAEDAATYYCQQWIFNPPTFGQGTKLEIKTTTPAPRPPTPAPTIASQPLSLRPEACRPAAGGAVHTRGLDFACDIYIWAPLAGTCGVLLLSLVITLYCKRGRKKLLYIFKQPFMRPVQTTQEEDGCSCRFPEEEEGGCELRVKFSRSADAPAYQQGQNQLYNELNLGRREEYDVLDKRRGRDPEMGGKPRRKNPQEGLYNELQKDKMAEAYSEIGMKGERRRGKGHDGLYQGLSTATKDTYDALHMQALPPR

SEQ ID NO: 1854 - DNA, 1476 bp, Artificial Sequence
  source: /note="Description of Artificial Sequence: Synthetic polynucleotide"
atggccctccctgtcaccgccctgctgcttccgctggctcttctgctccacgccgctcggccccaagtgcaactcgtccagtccggtgcagaagtcaagaagcctggttcctccgtgaaagtgtcctgcaaagcgtctggctacaccttcacccggtacaatatgcactgggtcagacaggcgcccggacagggcctggagtggatgggggccatctaccctgggaacggcgacactagctactcccaaaagttcaagggccgcgtgacgattaccgccgacaagtcaaccagcactgcctatatggagctgagctcgcttcggagcgaagataccgccgtgtactactgcgctcggagcttcttctacgggtcctcggattggtacttcgacgtctggggccaggggactactgtgaccgtgtcctccgggggaggaggatcgggcggaggcggttcgggaggcggcggaagcggaggcggaggttcagaaatcgtgctgacccagtccccggactttcagtcagtgactcccaaggagaaggtcaccattacttgtcgcgcctcctcctcggtgaacaacatgcactggtaccagcagaagccggaccagtccccgaagcccctgatctatgctacctccaacttggcgtccggcgtgccgtcaaggttcagcggatcgggttccgggacagactacaccctgactattaactcactcgaggccgaggatgccgccacctactactgccagcagtggatcttcaaccctccaaccttcggacaaggaaccaagctggaaatcaagaccactaccccagcaccgaggccacccaccccggctcctaccatcgcctcccagcctctgtccctgcgtccggaggcatgtagacccgcagctggtggggccgtgcatacccggggtcttgacttcgcctgcgatatctacatttgggcccctctggctggtacttgcggggtcctgctgctttcactcgtgatcactctttactgtaagcgcggtcggaagaagctgctgtacatctttaagcaacccttcatgaggcctgtgcagactactcaagaggaggacggctgttcatgccggttcccagaggaggaggaaggcggctgcgaactgcgcgtgaaattcagccgcagcgcagatgctccagcctaccagcaggggcagaaccagctctacaacgaactcaatcttggtcggagagaggagtacgacgtgctggacaagcggagaggacgggacccagaaatgggcgggaagccgcgcagaaagaatccccaagagggcctgtacaacgagctccaaaaggataagatggcagaagcctatagcgagattggtatgaaaggggaacgcagaagaggcaaaggccacgacggactgtaccagggactcagcaccgccaccaaggacacctatgacgctcttcacatgcaggccctgccgcctcgg

SEQ ID NO: 1855 - protein, 5 aa, Artificial Sequence
  source: /note="Description of Artificial Sequence: Synthetic peptide"
RYNMH

SEQ ID NO: 1856 - protein, 17 aa, Artificial Sequence
  source: /note="Description of Artificial Sequence: Synthetic peptide"
AIYPGNGDTSYSQKFKG

SEQ ID NO: 1857 - protein, 13 aa, Artificial Sequence
  source: /note="Description of Artificial Sequence: Synthetic peptide"
SFFYGSSDWYFDV

SEQ ID NO: 1858 - protein, 7 aa, Artificial Sequence
  source: /note="Description of Artificial Sequence: Synthetic peptide"
GYTFTRY

SEQ ID NO: 1859 - protein, 6 aa, Artificial Sequence
  source: /note="Description of Artificial Sequence: Synthetic peptide"
YPGNGD

SEQ ID NO: 1860 - protein, 13 aa, Artificial Sequence
  source: /note="Description of Artificial Sequence: Synthetic peptide"
SFFYGSSDWYFDV

SEQ ID NO: 1861 - protein, 8 aa, Artificial Sequence
  source: /note="Description of Artificial Sequence: Synthetic peptide"
GYTFTRYN

SEQ ID NO: 1862 - protein, 8 aa, Artificial Sequence
  source: /note="Description of Artificial Sequence: Synthetic peptide"
IYPGNGDT

SEQ ID NO: 1863 - protein, 15 aa, Artificial Sequence
  source: /note="Description of Artificial Sequence: Synthetic peptide"
ARSFFYGSSDWYFDV

SEQ ID NO: 1864 - protein, 10 aa, Artificial Sequence
  source: /note="Description of Artificial Sequence: Synthetic peptide"
GYTFTRYNMH

SEQ ID NO: 1865 - protein, 17 aa, Artificial Sequence
  source: /note="Description of Artificial Sequence: Synthetic peptide"
AIYPGNGDTSYSQKFKG

SEQ ID NO: 1866 - protein, 13 aa, Artificial Sequence
  source: /note="Description of Artificial Sequence: Synthetic peptide"
SFFYGSSDWYFDV

SEQ ID NO: 1867 - protein, 122 aa, Artificial Sequence; identical to SEQ ID NO: 1834
  source: /note="Description of Artificial Sequence: Synthetic polypeptide"

SEQ ID NO: 1868 - DNA, 366 bp, Artificial Sequence
  source: /note="Description of Artificial Sequence: Synthetic polynucleotide"
caagtccaactcgtccagtctggcgcagaagtcaagaagcccggaagctccgtgaaagtgtcctgcaaagcgtcgggttacactttcacccggtacaacatgcactgggtcagacaggcccctggacaaggactggagtggatgggtgccatctaccctggaaacggagatacctcctactcccaaaagttcaaggggagagtgaccattaccgccgacaagtcaacttccaccgcttacatggagctcagctccctgcggtccgaagatactgcggtgtactattgcgctcgctcatttttctacggctcatcggattggtacttcgacgtctggggacagggaactaccgtgaccgtgtcctcg

SEQ ID NO: 1869 - protein, 10 aa, Artificial Sequence
  source: /note="Description of Artificial Sequence: Synthetic peptide"
RASSSVNNMH

SEQ ID NO: 1870 - protein, 7 aa, Artificial Sequence
  source: /note="Description of Artificial Sequence: Synthetic peptide"
ATSNLAS

SEQ ID NO: 1871 - protein, 9 aa, Artificial Sequence
  source: /note="Description of Artificial Sequence: Synthetic peptide"
QQWIFNPPT

SEQ ID NO: 1872 - protein, 6 aa, Artificial Sequence
  source: /note="Description of Artificial Sequence: Synthetic peptide"
SSSVNN

SEQ ID NO: 1873 - protein, 3 aa, Artificial Sequence
  source: /note="Description of Artificial Sequence: Synthetic peptide"
ATS

SEQ ID NO: 1874 - protein, 6 aa, Artificial Sequence
  source: /note="Description of Artificial Sequence: Synthetic peptide"
WIFNPP

SEQ ID NO: 1875 - protein, 5 aa, Artificial Sequence
  source: /note="Description of Artificial Sequence: Synthetic peptide"
SSVNN

SEQ ID NO: 1876 - protein, 3 aa, Artificial Sequence
  source: /note="Description of Artificial Sequence: Synthetic peptide"
ATS

SEQ ID NO: 1877 - protein, 9 aa, Artificial Sequence
  source: /note="Description of Artificial Sequence: Synthetic peptide"
QQWIFNPPT

SEQ ID NO: 1878 - protein, 10 aa, Artificial Sequence
  source: /note="Description of Artificial Sequence: Synthetic peptide"
RASSSVNNMH

SEQ ID NO: 1879 - protein, 7 aa, Artificial Sequence
  source: /note="Description of Artificial Sequence: Synthetic peptide"
ATSNLAS

SEQ ID NO: 1880 - protein, 9 aa, Artificial Sequence
  source: /note="Description of Artificial Sequence: Synthetic peptide"
QQWIFNPPT

SEQ ID NO: 1881 - protein, 106 aa, Artificial Sequence; identical to SEQ ID NO: 1815
  source: /note="Description of Artificial Sequence: Synthetic polypeptide"

SEQ ID NO: 1882 - DNA, 318 bp, Artificial Sequence
  source: /note="Description of Artificial Sequence: Synthetic polynucleotide"
gacatccagctgactcagtccccgtccttcctgtccgcctccgtgggggaccgcgtgacgattacttgtcgggcctcctcatccgtgaacaacatgcattggtaccagcagaagccaggaaaggcaccgaagccgcttatctatgccacctcgaatctggccagcggagtgccttcgaggtttagcggctccggctccggcaccgagtacactttgaccattagcagcctccagccggaggacttcgccacatactactgccagcagtggatcttcaacccccccaccttcggccaaggaaccaagctggaaatcaag

SEQ ID NO: 1883 - protein, 20 aa, Artificial Sequence
  source: /note="Description of Artificial Sequence: Synthetic peptide"
GGGGSGGGGSGGGGSGGGGS

SEQ ID NO: 1884 - protein, 248 aa, Artificial Sequence
  source: /note="Description of Artificial Sequence: Synthetic polypeptide"
QVQLVQSGAEVKKPGSSVKVSCKASGYTFTRYNMHWVRQAPGQGLEWMGAIYPGNGDTSYSQKFKGRVTITADKSTSTAYMELSSLRSEDTAVYYCARSFFYGSSDWYFDVWGQGTTVTVSSGGGGSGGGGSGGGGSGGGGSDIQLTQSPSFLSASVGDRVTITCRASSSVNNMHWYQQKPGKAPKPLIYATSNLASGVPSRFSGSGSGTEYTLTISSLQPEDFATYYCQQWIFNPPTFGQGTKLEIK

SEQ ID NO: 1885 - DNA, 744 bp, Artificial Sequence
  source: /note="Description of Artificial Sequence: Synthetic polynucleotide"
caagtccaactcgtccagtctggcgcagaagtcaagaagcccggaagctccgtgaaagtgtcctgcaaagcgtcgggttacactttcacccggtacaacatgcactgggtcagacaggcccctggacaaggactggagtggatgggtgccatctaccctggaaacggagatacctcctactcccaaaagttcaaggggagagtgaccattaccgccgacaagtcaacttccaccgcttacatggagctcagctccctgcggtccgaagatactgcggtgtactattgcgctcgctcatttttctacggctcatcggattggtacttcgacgtctggggacagggaactaccgtgaccgtgtcctcggggggaggaggatcgggcggaggcggttcgggaggcggcggaagcggaggcggaggttcagacatccagctgactcagtccccgtccttcctgtccgcctccgtgggggaccgcgtgacgattacttgtcgggcctcctcatccgtgaacaacatgcattggtaccagcagaagccaggaaaggcaccgaagccgcttatctatgccacctcgaatctggccagcggagtgccttcgaggtttagcggctccggctccggcaccgagtacactttgaccattagcagcctccagccggaggacttcgccacatactactgccagcagtggatcttcaacccccccaccttcggccaaggaaccaagctggaaatcaag

SEQ ID NO: 1886 - protein, 492 aa, Artificial Sequence
  source: /note="Description of Artificial Sequence: Synthetic polypeptide"
MALPVTALLLPLALLLHAARPQVQLVQSGAEVKKPGSSVKVSCKASGYTFTRYNMHWVRQAPGQGLEWMGAIYPGNGDTSYSQKFKGRVTITADKSTSTAYMELSSLRSEDTAVYYCARSFFYGSSDWYFDVWGQGTTVTVSSGGGGSGGGGSGGGGSGGGGSDIQLTQSPSFLSASVGDRVTITCRASSSVNNMHWYQQKPGKAPKPLIYATSNLASGVPSRFSGSGSGTEYTLTISSLQPEDFATYYCQQWIFNPPTFGQGTKLEIKTTTPAPRPPTPAPTIASQPLSLRPEACRPAAGGAVHTRGLDFACDIYIWAPLAGTCGVLLLSLVITLYCKRGRKKLLYIFKQPFMRPVQTTQEEDGCSCRFPEEEEGGCELRVKFSRSADAPAYQQGQNQLYNELNLGRREEYDVLDKRRGRDPEMGGKPRRKNPQEGLYNELQKDKMAEAYSEIGMKGERRRGKGHDGLYQGLSTATKDTYDALHMQALPPR

SEQ ID NO: 1887 - DNA, 1476 bp, Artificial Sequence
  source: /note="Description of Artificial Sequence: Synthetic polynucleotide"
atggccctccctgtcaccgccctgctgcttccgctggctcttctgctccacgccgctcggccccaagtccaactcgtccagtctggcgcagaagtcaagaagcccggaagctccgtgaaagtgtcctgcaaagcgtcgggttacactttcacccggtacaacatgcactgggtcagacaggcccctggacaaggactggagtggatgggtgccatctaccctggaaacggagatacctcctactcccaaaagttcaaggggagagtgaccattaccgccgacaagtcaacttccaccgcttacatggagctcagctccctgcggtccgaagatactgcggtgtactattgcgctcgctcatttttctacggctcatcggattggtacttcgacgtctggggacagggaactaccgtgaccgtgtcctcggggggaggggggagcggcggagggggctcgggcggtggaggaagcggaggcggcggttcggacatccagctgactcagtccccgtccttcctgtccgcctccgtgggggaccgcgtgacgattacttgtcgggcctcctcatccgtgaacaacatgcattggtaccagcagaagccaggaaaggcaccgaagccgcttatctatgccacctcgaatctggccagcggagtgccttcgaggtttagcggctccggctccggcaccgagtacactttgaccattagcagcctccagccggaggacttcgccacatactactgccagcagtggatcttcaacccccccaccttcggccaaggaaccaagctggaaatcaagaccactaccccagcaccgaggccacccaccccggctcctaccatcgcctcccagcctctgtccctgcgtccggaggcatgtagacccgcagctggtggggccgtgcatacccggggtcttgacttcgcctgcgatatctacatttgggcccctctggctggtacttgcggggtcctgctgctttcactcgtgatcactctttactgtaagcgcggtcggaagaagctgctgtacatctttaagcaacccttcatgaggcctgtgcagactactcaagaggaggacggctgttcatgccggttcccagaggaggaggaaggcggctgcgaactgcgcgtgaaattcagccgcagcgcagatgctccagcctaccagcaggggcagaaccagctctacaacgaactcaatcttggtcggagagaggagtacgacgtgctggacaagcggagaggacgggacccagaaatgggcgggaagccgcgcagaaagaatccccaagagggcctgtacaacgagctccaaaaggataagatggcagaagcctatagcgagattggtatgaaaggggaacgcagaagaggcaaaggccacgacggactgtaccagggactcagcaccgccaccaaggacacctatgacgctcttcacatgcaggccctgccgcctcgg

SEQ ID NO: 1888 - protein, 122 aa, Artificial Sequence
  source: /note="Description of Artificial Sequence: Synthetic polypeptide"
QVHLQQSGAELAKPGASVKMSCKASGYTFTNYWMHWVKQRPGQGLEWIGFITPTTGYPEYNQKFKDKATLTADKSSSTAYMQLSSLTSEDSAVYYCARRKVGKGVYYALDYWGQGTSVTVSS

SEQ ID NO: 1889 - DNA, 366 bp, Artificial Sequence
  source: /note="Description of Artificial Sequence: Synthetic polynucleotide"
caagtgcatctgcagcagtcgggggccgaactggcaaagccaggcgccagcgtgaagatgagctgcaaggcctccgggtacaccttcaccaactactggatgcactgggtcaagcagcgcccgggccagggactcgagtggatcgggttcatcacgccgactaccggctacccggagtataaccagaagttcaaggacaaggccactctgactgccgacaagtcctcgtctaccgcgtacatgcaactgtcctcactgacttcggaggattccgctgtgtactactgcgcgcggaggaaagtcggaaagggagtgtactatgccctggactactggggccagggtaccagcgtcactgtgtcctcc

SEQ ID NO: 1890 - protein, 107 aa, Artificial Sequence
  source: /note="Description of Artificial Sequence: Synthetic polypeptide"
DILMTQSPASLSASVGETVTITCRASGNIHNYLAWYQQKQGNSPQLLVYNTKTLADGVPSRFSGSGSGTQYSLKINSLQTEDFGTYYCQHFWSSPWTFGGGTKLEIK

SEQ ID NO: 1891 - DNA, 321 bp, Artificial Sequence
  source: /note="Description of Artificial Sequence: Synthetic polynucleotide"
gacattctgatgacccagtcccctgcatcactctccgcgtccgtgggagaaaccgtgaccatcacgtgtagagcctccggcaacatccacaactacctggcctggtaccagcagaagcagggaaactcgccccaactgcttgtgtacaacaccaagaccttggctgacggagtgccttcccggttctcgggttcgggatcaggcacacagtactccctgaaaatcaatagcctccagaccgaagattttggaacctactactgccaacacttctggagctccccctggactttcggaggcggtaccaagctcgagattaag

SEQ ID NO: 1892 - protein, 122 aa, Artificial Sequence
  source: /note="Description of Artificial Sequence: Synthetic polypeptide"
QVQLQQPGAELVKPGASVKMSCKASGYTFTNYNLHWVKQTPGQGLEWIGAIYPGNYDTSYNQKFKGKATLTADKSSSTAYMLLSSLTSEDSAVYFCARVDFGHSRYWYFDVWGAGTTVTVSS

SEQ ID NO: 1893 - DNA, 366 bp, Artificial Sequence
  source: /note="Description of Artificial Sequence: Synthetic polynucleotide"
caagtgcagctgcagcagcctggtgccgagctcgtgaagccgggagcgtccgtgaagatgagctgcaaagcctcgggctacaccttcaccaattacaacttgcattgggtcaagcagaccccgggccagggcctcgaatggatcggagcgatctaccccgggaactacgatactagctacaaccagaagttcaagggaaaggccaccctgaccgccgataagtcctcatccaccgcctacatgctgctgtcctcgctgacttccgaggactccgctgtgtacttctgcgcccgcgtggacttcggacacagcagatattggtattttgacgtctggggcgccgggactaccgtgactgtgtcgtcc

SEQ ID NO: 1894 - protein, 106 aa, Artificial Sequence
  source: /note="Description of Artificial Sequence: Synthetic polypeptide"
QIVLSQSPAILSASPGEKVTMTCRATSSVSSMNWYQQKPGSFPRPWIHATSNLASGVPARFSGSGSGTSYSLTISRVEAEDAATYYCQQWTFNPPTFGAGAKLELK

SEQ ID NO: 1895 - DNA, 318 bp, Artificial Sequence
  source: /note="Description of Artificial Sequence: Synthetic polynucleotide"
caaattgtcctgagccagagcccggctatcctgtccgcctcaccgggcgaaaaggtcaccatgacttgtcgggccacttcctccgtgtcatccatgaactggtaccagcagaagcctggcagcttccctcggccatggattcacgccacgtcaaacctggcatcgggagtgcccgcaaggttctccgggtccggcagcggaacatcctactccctcaccatctcgcgcgtggaagcggaggacgctgccacctactactgccaacagtggaccttcaacccccccacctttggagcgggagccaagctggaacttaag

SEQ ID NO: 1896 - protein, 122 aa, Artificial Sequence
  source: /note="Description of Artificial Sequence: Synthetic polypeptide"
QVQLQQPGAELVKPGASVKMSCKASGYTFTSYNMHWVKQTPGQGLEWIGAIYPGNGDTSYNPKFKGKATLTADKSSRTAYIHLSSLTSEDSVVYYCARSYFYGSSSWYFDVWGAGTTVTVSS

SEQ ID NO: 1897 - DNA, 366 bp, Artificial Sequence
  source: /note="Description of Artificial Sequence: Synthetic polynucleotide"
caagtgcagctgcagcagccgggagcagagctcgtgaagcctggagcctcagtgaagatgagctgcaaggcctccggttacaccttcacctcctacaacatgcactgggtcaagcagacccccggacaaggcctggaatggatcggcgccatctacccgggaaacggggacacctcctataaccccaagttcaagggaaaagcaaccctgaccgcggacaagtccagcagaactgcctacatccatctttcctcgctgacgtccgaggattccgtggtgtactactgtgcccgctcctacttctacgggtcatcctcgtggtacttcgatgtctggggcgctggaaccaccgtgactgtgtcctcc

SEQ ID NO: 1898 - protein, 106 aa, Artificial Sequence
  source: /note="Description of Artificial Sequence: Synthetic polypeptide"
QIILSQSPAILSASPGEKVTLTCRASSSVSSMHWYQQKPGSSPKPWIFATSNLASGVPARFTGSGSGTSYSLTISRVEAEDAATYYCQQWIFNPPTFGGGTSLEIK

SEQ ID NO: 1899 - DNA, 318 bp, Artificial Sequence
  source: /note="Description of Artificial Sequence: Synthetic polynucleotide"
cagatcattctgagccagagcccggccattctgtctgcctcgcctggagaaaaagtcaccctcacttgccgggccagctcctccgtgtcctcaatgcactggtaccagcagaagcctggctcaagcccgaagccctggatcttcgccacctccaatctggcgtcaggagtgcccgcgaggttcactggatcggggtccggcacatcgtattcgctcaccatttcccgggtggaggccgaggacgccgctacttactactgccaacagtggatcttcaacccaccgacctttggcggagggacttccttggaaatcaag

SEQ ID NO: 1900 - protein, 121 aa, Artificial Sequence
  source: /note="Description of Artificial Sequence: Synthetic polypeptide"
QIQLVQSGPELKKPGETVKISCKTSGYTFTSHGINWVKQAPRKGLKWMGWINTYTGEPTYGDDFKGRFAFSLETSARTAYLQINNLKNEDTATYFCARYGNYEEPYAMDYWGQGTSVTVSS

SEQ ID NO: 1901 - DNA, 363 bp, Artificial Sequence
  source: /note="Description of Artificial Sequence: Synthetic polynucleotide"
caaattcagctggtgcagtcgggacctgagctcaagaagcccggagaaaccgtgaagatctcctgcaagacttccgggtacacttttacttcccacggcatcaactgggtcaagcaggcaccaaggaaggggcttaagtggatgggctggattaacacctacaccggcgaacccacctatggcgatgacttcaaaggacggttcgcgttctccctcgaaacctcagcaagaaccgcgtatttgcaaatcaacaacctgaagaacgaggacaccgccacctacttctgcgcccgctacggaaattacgaggaaccttacgctatggactactggggccagggcacttccgtgactgtgtcgtcc

SEQ ID NO: 1902 - protein, 106 aa, Artificial Sequence; identical to SEQ ID NO: 1894
  source: /note="Description of Artificial Sequence: Synthetic polypeptide"

SEQ ID NO: 1903 - DNA, 318 bp, Artificial Sequence
  source: /note="Description of Artificial Sequence: Synthetic polynucleotide"
cagatcgtgctgagccagagccccgccatcctgagcgcttccccgggagaaaaggtcaccatgacttgccgggccactagcagcgtgtcctccatgaactggtaccagcagaagccgggctccttccctcgcccctggattcatgccacctcaaacctggccagcggagtgccagccagattctcgggatctggatcggggacgtcctactccctcaccatctcgcgggtggaggccgaagatgccgccacatactactgtcaacagtggaccttcaacccgccgacctttggagcgggggccaagctggagctgaaa

SEQ ID NO: 1904 - protein, 122 aa, Artificial Sequence
  source: /note="Description of Artificial Sequence: Synthetic polypeptide"
QVQLQQPGAELVKPGASVKMSCKASGYTFTSYNIHWVKQTPGQGLEWIGAIYPGNGDTSYNQKFKGKATLTADKSSTTAFIHFSSLTSEDSVVYYCARSYFYGSDSWYFDVWGAGTTVTVSS

SEQ ID NO: 1905 - DNA, 366 bp, Artificial Sequence
  source: /note="Description of Artificial Sequence: Synthetic polynucleotide"
caagtgcagcttcagcagcctggggccgaactcgtgaagccaggagcctccgtgaagatgtcatgcaaagcctccggctacacttttacctcctacaacattcattgggtcaagcagacacctggccagggcctggaatggattggtgcaatctacccgggcaacggagacacctcgtacaaccagaagtttaaggggaaggccaccctgaccgcggacaagtcaagcactaccgcgttcattcacttctcgtccttgacctccgaggatagcgtggtgtactactgcgcccgctcctatttctacggctccgattcgtggtacttcgacgtctggggagccggaactaccgtgaccgtgtcctcc

SEQ ID NO: 1906 - protein, 106 aa, Artificial Sequence
  source: /note="Description of Artificial Sequence: Synthetic polypeptide"
QIILSQSPAILSASPGEKVTLTCRASSGVPSLHWYQQKPGSSPKPWIFATSNLASGVPARFSGSGSGTSYSLTISRVEAEDAATYYCQQWIFNPPTFGGGTSLEIK

SEQ ID NO: 1907 - DNA, 318 bp, Artificial Sequence
  source: /note="Description of Artificial Sequence: Synthetic polynucleotide"
caaatcatcctgagccagagcccggccatcctgtcggcttcacccggggaaaaggtcacgctgacttgccgggcctcctccggcgtgccaagcctccactggtaccagcaaaagcctggctcgtcccccaaaccctggattttcgccacctccaacctggctagcggagtgccggccagattctcgggttccgggtccggcaccagctattctctcaccatctcccgggtcgaggcggaggacgcagcgacttactactgtcaacagtggatcttcaatccgcccaccttcggcggaggaacttccctggaaatcaag

SEQ ID NO: 1908 - protein, 122 aa, Artificial Sequence
  source: /note="Description of Artificial Sequence: Synthetic polypeptide"
QVQLLQPGAELVKPGASVKMSCKASGYTFTRYNMHWVKQTPGQGLEWIGAIYPGNGDTSYSQKFKGKATLTADKSSSTAYMQLSSLTSEDSAVYYCARSFFYGSSDWYFDVWGAGTTVSVSS

SEQ ID NO: 1909 - DNA, 366 bp, Artificial Sequence
  source: /note="Description of Artificial Sequence: Synthetic polynucleotide"
caagtgcagctgctgcagcccggagccgaactcgtgaagccgggcgcatccgtgaaaatgagctgcaaggcgtccggttacaccttcactcgctacaacatgcactgggtcaagcagacccctggacaaggcctggagtggattggtgctatctacccgggaaacggagacactagctactcgcagaaattcaagggaaaggccacgctgaccgccgataagtcctcctccactgcctacatgcaactcagctcactgacctcagaggactcggccgtgtactactgcgcgaggtccttcttctacgggtcctcggattggtacttcgacgtctggggcgccggtaccaccgtgtccgtgtcatcc

SEQ ID NO: 1910 - protein, 106 aa, Artificial Sequence
  source: /note="Description of Artificial Sequence: Synthetic polypeptide"
QIVLSQSPAILSTSPGEKVTLTCRASSSVNNMHWYQQKPGSSPKPWIYATSNLASGVPSRFSGSGSGTSYSLTISRVEAEDAATYYCQQWIFNPPTFGAGTKLELK

SEQ ID NO: 1911 - DNA, 318 bp, Artificial Sequence
  source: /note="Description of Artificial Sequence: Synthetic polynucleotide"
cagatcgtgctgagccagtccccggcgattctgtccacctcgcctggggaaaaggtcaccctgacatgtagagcctcctcctccgtgaacaatatgcattggtatcagcagaagccaggatcaagccccaagccctggatctatgccacttcgaaccttgcctctggagtgccctcacggttctccggctcgggatcggggaccagctacagcttgactatctcccgggtggaggctgaggacgccgcaacctactactgccagcaatggatcttcaaccctccgacttttggggccggaaccaagctggaactcaag

SEQ ID NO: 1912 - protein, 117 aa, Artificial Sequence
  source: /note="Description of Artificial Sequence: Synthetic polypeptide"
QVQLVESGGGVVQPGRSLRLSCAASGFTFRDYYMAWVRQAPGKGLEWVASISYEGNPYYGDSVKGRFTISRDNAKSTLYLQMSSLRAEDTAVYYCARHDHNNVDWFAYWGQGTLVTV

SEQ ID NO: 1913 - DNA, 357 bp, Artificial Sequence
  source: /note="Description of Artificial Sequence: Synthetic polynucleotide"
caagtgcagttggtggaatcaggaggaggtgtcgtgcaaccaggaagatcattgaggctctcatgcgccgccagcggattcacctttcgggattactacatggcctgggtccgccaggccccggggaagggactggaatgggtggcatccatctcgtacgaagggaacccctactatggggactccgtgaagggacggttcaccatctcccgggacaacgccaagtccaccctgtaccttcaaatgtcctcgctgagggcggaggatactgctgtctactactgtgcccgccacgaccataacaacgtggactggttcgcctactggggccagggaaccctcgtcaccgtgtcctcg

SEQ ID NO: 1914 - protein, 112 aa, Artificial Sequence
  source: /note="Description of Artificial Sequence: Synthetic polypeptide"
DIVMTQTPLSLSVTPGQPVSMSCKSSQSLLYSENKKNYLAWYLQKPGQSPQLLIFWASTRESGVPDRFSGSGSGTDFTLKISRVEAEDVGVYYCQQYYNFPTFGQGTKLEIK

SEQ ID NO: 1915 - DNA, 336 bp, Artificial Sequence
  source: /note="Description of Artificial Sequence: Synthetic polynucleotide"
gacattgtgatgacgcagactcccctgtcgctctccgtgacccctggccagcccgtgtcgatgtcgtgcaagagctcccagtccctgctgtattccgagaacaagaagaattaccttgcgtggtacctccagaagccggggcagagcccgcagctgctgattttctgggcgtccactagagagtctggagtgcctgaccggtttagcggaagcggctccggtactgatttcaccctgaaaatctcgcgcgtggaagctgaggacgtgggcgtgtactactgccagcagtactacaacttccctactttcggacaaggaaccaagctggaaatcaag

SEQ ID NO: 1916 - protein, 20 aa, Artificial Sequence
  source: /note="Description of Artificial Sequence: Synthetic peptide"
GGGGSGGGGSGGGGSGGGGS

SEQ ID NO: 1917 - protein, 251 aa, Artificial Sequence
  source: /note="Description of Artificial Sequence: Synthetic polypeptide"
QVQLVESGGGVVQPGRSLRLSCAASGFTFRDYYMAWVRQAPGKGLEWVASISYEGNPYYGDSVKGRFTISRDNAKSTLYLQMSSLRAEDTAVYYCARHDHNNVDWFAYWGQGTLVTVSSGGGGSGGGGSGGGGSGGGGSDIVMTQTPLSLSVTPGQPVSMSCKSSQSLLYSENKKNYLAWYLQKPGQSPQLLIFWASTRESGVPDRFSGSGSGTDFTLKISRVEAEDVGVYYCQQYYNFPTFGQGTKLEIK

SEQ ID NO: 1918 - protein, 119 aa, Artificial Sequence
  source: /note="Description of Artificial Sequence: Synthetic polypeptide"
QVQLVQSGAEVKKPGASVKVSCKASGFTFRDYYMAWVRQAPGQRLEWMGSISYEGNPYYGDSVKGRVTITRDNSASTLYMELSSLRSEDTAVYYCARHDHNNVDWFAYWGQGTLVTVSS

SEQ ID NO: 1919 - DNA, 357 bp, Artificial Sequence
  source: /note="Description of Artificial Sequence: Synthetic polynucleotide"
caagtccaactcgtccagtccggtgcagaagtcaagaaaccaggagcttccgtgaaagtgtcgtgcaaagcttcaggcttcaccttccgcgactattacatggcctgggtccgccaagcgcccggacagcggctggagtggatggggtccatttcctacgaggggaacccctactatggagattccgtgaagggcagagtgacgatcactcgggataactccgcctccactctctacatggaactgtcctcgcttcggagcgaagataccgcggtgtactactgcgcccgccacgaccataacaacgtggactggttcgcctactggggacaggggaccctcgtgaccgtgtcctct

SEQ ID NO: 1920 - protein, 112 aa, Artificial Sequence
  source: /note="Description of Artificial Sequence: Synthetic polypeptide"
DIQMTQSPSSLSASVGDRVTITCKSSQSLLYSENKKNYLAWYQQKPGKVPKLLIFWASTRESGVPSRFSGSGSGTDFTLTISSLQPEDVATYYCQQYYNFPTFGQGTKLEIK

SEQ ID NO: 1921 - DNA, 336 bp, Artificial Sequence
  source: /note="Description of Artificial Sequence: Synthetic polynucleotide"
gacattcagatgacccagtccccgagctcgctgtccgcctccgtgggagacagagtgacaatcacttgcaagagcagccagtcactgttgtactccgagaacaagaagaactacctcgcctggtaccagcagaagccgggaaaggtccctaagctgctgatcttctgggccagcactagggagtcgggagtgccgtcacggttcagcggatcgggatcgggtaccgacttcaccctgactatctcctccctgcaacctgaggacgtggccacctactactgtcagcagtactacaattttcccaccttcggccagggtaccaagctggaaatcaag

SEQ ID NO: 1922 - protein, 20 aa, Artificial Sequence
  source: /note="Description of Artificial Sequence: Synthetic peptide"
GGGGSGGGGSGGGGSGGGGS

SEQ ID NO: 1923 - protein, 251 aa, Artificial Sequence
  source: /note="Description of Artificial Sequence: Synthetic polypeptide"
QVQLVQSGAEVKKPGASVKVSCKASGFTFRDYYMAWVRQAPGQRLEWMGSISYEGNPYYGDSVKGRVTITRDNSASTLYMELSSLRSEDTAVYYCARHDHNNVDWFAYWGQGTLVTVSSGGGGSGGGGSGGGGSGGGGSDIQMTQSPSSLSASVGDRVTITCKSSQSLLYSENKKNYLAWYQQKPGKVPKLLIFWASTRESGVPSRFSGSGSGTDFTLTISSLQPEDVATYYCQQYYNFPTFGQGTKLEIK

SEQ ID NO: 1924 - protein, 119 aa, Artificial Sequence
  source: /note="Description of Artificial Sequence: Synthetic polypeptide"
EVQLVQSGAEVKKPGESLKISCKGSGFTFRDYYMAWVRQMPGKGLEWMGSISYEGNPYYGDSVKGQVTISRDNSISTLYLQWSSLKASDTAMYYCARHDHNNVDWFAYWGQGTLVTVSS

SEQ ID NO: 1925 - DNA, 357 bp, Artificial Sequence
  source: /note="Description of Artificial Sequence: Synthetic polynucleotide"
gaagtccaactggtgcagtcaggagcagaagtcaaaaaaccaggagaaagcctcaagatcagctgcaagggctcgggtttcaccttccgggactactatatggcctgggtcagacagatgccgggaaagggactggaatggatggggtcaatcagctacgagggcaacccctactacggagactccgtgaagggacaggtcacaatctcccgggacaactcgatttccactctgtatctgcaatggagctccctcaaggcctccgacactgcgatgtactactgtgcgcggcatgaccacaacaatgtggattggttcgcctactggggacagggaaccctcgtgaccgtgtccagc

SEQ ID NO: 1926 - protein, 112 aa, Artificial Sequence; identical to SEQ ID NO: 1920
  source: /note="Description of Artificial Sequence: Synthetic polypeptide"

SEQ ID NO: 1927 - DNA, 336 bp, Artificial Sequence
  source: /note="Description of Artificial Sequence: Synthetic polynucleotide"
gatatccaaatgacccagtcgccctcctcactctccgcctccgtgggagatcgcgtgaccattacttgcaagagctcgcagtccctgctgtactccgagaacaagaagaactacttggcctggtaccagcagaagcccggcaaagtgccgaagctgcttatcttttgggcctcgaccagggaaagcggagtgccgtcacgcttctccggctccgggtctggcaccgacttcactctgactatttcctccctgcaacctgaggacgtggctacctactactgccagcagtactacaacttccctaccttcggccaagggacgaagctggagatcaag

SEQ ID NO: 1928 - protein, 20 aa, Artificial Sequence
  source: /note="Description of Artificial Sequence: Synthetic peptide"
GGGGSGGGGSGGGGSGGGGS

SEQ ID NO: 1929 - protein, 251 aa, Artificial Sequence
  source: /note="Description of Artificial Sequence: Synthetic polypeptide"
EVQLVQSGAEVKKPGESLKISCKGSGFTFRDYYMAWVRQMPGKGLEWMGSISYEGNPYYGDSVKGQVTISRDNSISTLYLQWSSLKASDTAMYYCARHDHNNVDWFAYWGQGTLVTVSSGGGGSGGGGSGGGGSGGGGSDIQMTQSPSSLSASVGDRVTITCKSSQSLLYSENKKNYLAWYQQKPGKVPKLLIFWASTRESGVPSRFSGSGSGTDFTLTISSLQPEDVATYYCQQYYNFPTFGQGTKLEIK

SEQ ID NO: 1930 - protein, 119 aa, Artificial Sequence; identical to SEQ ID NO: 1924
  source: /note="Description of Artificial Sequence: Synthetic polypeptide"

SEQ ID NO: 1931 - DNA, 357 bp, Artificial Sequence
  source: /note="Description of Artificial Sequence: Synthetic polynucleotide"
gaagtgcagttggtccaatcaggcgcagaagtgaagaaacccggagaatcattgaagatttcgtgcaaaggaagcgggttcacattccgcgattactacatggcgtgggtcagacagatgccgggaaagggactcgagtggatggggtccatcagctacgaaggaaacccttactacggggactccgtgaagggccaggtcaccatctcccgcgacaactcaatctccactctgtatctgcaatggtcgagcctcaaggcctctgatactgcgatgtactactgcgctcggcatgaccacaacaacgtggactggttcgcttactggggacagggtacccttgtgaccgtgtcctcc

SEQ ID NO: 1932 - protein, 112 aa, Artificial Sequence
  source: /note="Description of Artificial Sequence: Synthetic polypeptide"
EIVMTQSPATLSLSPGERATLSCKSSQSLLYSENKKNYLAWYQQKPGQAPRLLIFWASTRESGIPARFSGSGSGTDFTLTISSLQPEDLAVYYCQQYYNFPTFGQGTKLEIK

SEQ ID NO: 1933 - DNA, 336 bp, Artificial Sequence
  source: /note="Description of Artificial Sequence: Synthetic polynucleotide"
gagatcgtgatgactcagtcccctgccaccctctcgctgtcccccggggagagggccacgctgtcctgcaagagctcccagtcactgctgtattccgaaaacaagaagaactacctcgcctggtaccaacagaagccgggacaggccccgcggcttctgatcttctgggcctccactcgggagtccggcattccggcccgcttctccggctcggggagcggaactgacttcaccctgaccatcagcagcctgcagccagaggacctcgcagtgtactactgtcaacagtactacaatttccccacctttggccagggtaccaagctggagattaag

SEQ ID NO: 1934 - protein, 20 aa, Artificial Sequence
  source: /note="Description of Artificial Sequence: Synthetic peptide"
GGGGSGGGGSGGGGSGGGGS

SEQ ID NO: 1935 - protein, 251 aa, Artificial Sequence
  source: /note="Description of Artificial Sequence: Synthetic polypeptide"
EVQLVQSGAEVKKPGESLKISCKGSGFTFRDYYMAWVRQMPGKGLEWMGSISYEGNPYYGDSVKGQVTISRDNSISTLYLQWSSLKASDTAMYYCARHDHNNVDWFAYWGQGTLVTVSSGGGGSGGGGSGGGGSGGGGSEIVMTQSPATLSLSPGERATLSCKSSQSLLYSENKKNYLAWYQQKPGQAPRLLIFWASTRESGIPARFSGSGSGTDFTLTISSLQPEDLAVYYCQQYYNFPTFGQGTKLEIK

SEQ ID NO: 1936 - protein, 5 aa, Artificial Sequence
  source: /note="Description of Artificial Sequence: Synthetic peptide"
DYAMH

SEQ ID NO: 1937 - protein, 17 aa, Artificial Sequence
  source: /note="Description of Artificial Sequence: Synthetic peptide"
TISWNSGSIGYADSVKG

SEQ ID NO: 1938 - protein, 13 aa, Artificial Sequence
  source: /note="Description of Artificial Sequence: Synthetic peptide"
DIQYGNYYYGMDV

SEQ ID NO: 1939 - protein, 7 aa, Artificial Sequence
  source: /note="Description of Artificial Sequence: Synthetic peptide"
GFTFNDY

SEQ ID NO: 1940 - protein, 6 aa, Artificial Sequence
  source: /note="Description of Artificial Sequence: Synthetic peptide"
SWNSGS

SEQ ID NO: 1941 - protein, 13 aa, Artificial Sequence
  source: /note="Description of Artificial Sequence: Synthetic peptide"
DIQYGNYYYGMDV

SEQ ID NO: 1942 - protein, 8 aa, Artificial Sequence
  source: /note="Description of Artificial Sequence: Synthetic peptide"
GFTFNDYA

SEQ ID NO: 1943 - protein, 8 aa, Artificial Sequence
  source: /note="Description of Artificial Sequence: Synthetic peptide"
ISWNSGSI

SEQ ID NO: 1944 - protein, 15 aa, Artificial Sequence
  source: /note="Description of Artificial Sequence: Synthetic peptide"
AKDIQYGNYYYGMDV

SEQ ID NO: 1945 - protein, 122 aa, Artificial Sequence
  source: /note="Description of Artificial Sequence: Synthetic polypeptide"
EVQLVESGGGLVQPGRSLRLSCAASGFTFNDYAMHWVRQAPGKGLEWVSTISWNSGSIGYADSVKGRFTISRDNAKKSLYLQMNSLRAEDTALYYCAKDIQYGNYYYGMDVWGQGTTVTVSS

SEQ ID NO: 1946 - DNA, 366 bp, Artificial Sequence
  source: /note="Description of Artificial Sequence: Synthetic polynucleotide"
gaggtgcagctggtcgagtcggggggaggattggtgcagccgggcagaagcctgcggctctcatgtgccgcctccggcttcacctttaacgactacgcaatgcactgggtcagacaggctcctgggaagggcctggaatgggtgtccaccatttcctggaactccgggagcatcggctacgctgactccgtgaagggccgcttcacgattagccgcgataacgcgaaaaagagcctgtacctccaaatgaactccctgcgggccgaagataccgccctttactactgcgcgaaggacattcagtatggaaactactactacggaatggacgtctggggacaggggaccacagtgaccgtgtcaagc

SEQ ID NO: 1947 - protein, 11 aa, Artificial Sequence
  source: /note="Description of Artificial Sequence: Synthetic peptide"
RASQSVSSYLA

SEQ ID NO: 1948 - protein, 7 aa, Artificial Sequence
  source: /note="Description of Artificial Sequence: Synthetic peptide"
DASNRAT

SEQ ID NO: 1949 - protein, 9 aa, Artificial Sequence
  source: /note="Description of Artificial Sequence: Synthetic peptide"
QQRSNWPIT

SEQ ID NO: 1950 - protein, 7 aa, Artificial Sequence
  source: /note="Description of Artificial Sequence: Synthetic peptide"
SQSVSSY

SEQ ID NO: 1951 - protein, 3 aa, Artificial Sequence
  source: /note="Description of Artificial Sequence: Synthetic peptide"
DAS

SEQ ID NO: 1952 - protein, 6 aa, Artificial Sequence
  source: /note="Description of Artificial Sequence: Synthetic peptide"
RSNWPI

SEQ ID NO: 1953 - protein, 6 aa, Artificial Sequence
  source: /note="Description of Artificial Sequence: Synthetic peptide"
QSVSSY

SEQ ID NO: 1954 - protein, 3 aa, Artificial Sequence
  source: /note="Description of Artificial Sequence: Synthetic peptide"
DAS

SEQ ID NO: 1955 - protein, 9 aa, Artificial Sequence
  source: /note="Description of Artificial Sequence: Synthetic peptide"
QQRSNWPIT

SEQ ID NO: 1956 - protein, 107 aa, Artificial Sequence
  source: /note="Description of Artificial Sequence: Synthetic polypeptide"
EIVLTQSPATLSLSPGERATLSCRASQSVSSYLAWYQQKPGQAPRLLIYDASNRATGIPARFSGSGSGTDFTLTISSLEPEDFAVYYCQQRSNWPITFGQGTRLEIK

SEQ ID NO: 1957 - DNA, 321 bp, Artificial Sequence
  source: /note="Description of Artificial Sequence: Synthetic polynucleotide"
gaaatcgtgctgacccagagcccagccactttgtcactgtcccccggcgaaagagccactctgtcctgccgggcatcgcagtccgtgtcgtcctacctggcctggtaccagcaaaagcccggacaagcccctcgccttctcatctacgacgcctccaatcgcgcgaccggaatcccggccaggttctccgggagcggttcaggcactgacttcaccctgaccatctcgtccctggagccggaggatttcgccgtgtattactgccagcagcggtccaactggcccatcaccttcggccaagggactcggctcgaaatcaag

SEQ ID NO: 1958 - protein, 20 aa, Artificial Sequence
  source: /note="Description of Artificial Sequence: Synthetic peptide"
GGGGSGGGGSGGGGSGGGGS

SEQ ID NO: 1959 - protein, 249 aa, Artificial Sequence
  source: /note="Description of Artificial Sequence: Synthetic polypeptide"
EVQLVESGGGLVQPGRSLRLSCAASGFTFNDYAMHWVRQAPGKGLEWVSTISWNSGSIGYADSVKGRFTISRDNAKKSLYLQMNSLRAEDTALYYCAKDIQYGNYYYGMDVWGQGTTVTVSSGGGGSGGGGSGGGGSGGGGSEIVLTQSPATLSLSPGERATLSCRASQSVSSYLAWYQQKPGQAPRLLIYDASNRATGIPARFSGSGSGTDFTLTISSLEPEDFAVYYCQQRSNWPITFGQGTRLEIK

SEQ ID NO: 1960 - DNA, 747 bp, Artificial Sequence
  source: /note="Description of Artificial Sequence: Synthetic polynucleotide"
gaggtgcagctggtcgagtcggggggaggattggtgcagccgggcagaagcctgcggctctcatgtgccgcctccggcttcacctttaacgactacgcaatgcactgggtcagacaggctcctgggaagggcctggaatgggtgtccaccatttcctggaactccgggagcatcggctacgctgactccgtgaagggccgcttcacgattagccgcgataacgcgaaaaagagcctgtacctccaaatgaactccctgcgggccgaagataccgccctttactactgcgcgaaggacattcagtatggaaactactactacggaatggacgtctggggacaggggaccacagtgaccgtgtcaagcggcggtggaggatctggcggaggaggttccggtggcggtggatcgggagggggaggatcggaaatcgtgctgacccagagcccagccactttgtcactgtcccccggcgaaagagccactctgtcctgccgggcatcgcagtccgtgtcgtcctacctggcctggtaccagcaaaagcccggacaagcccctcgccttctcatctacgacgcctccaatcgcgcgaccggaatcccggccaggttctccgggagcggttcaggcactgacttcaccctgaccatctcgtccctggagccggaggatttcgccgtgtattactgccagcagcggtccaactggcccatcaccttcggccaagggactcggctcgaaatcaag

SEQ ID NO: 1961 - protein, 119 aa, Artificial Sequence
  source: /note="Description of Artificial Sequence: Synthetic polypeptide"
EVQLVESGGGLVQPGRSLKLSCAASGFTFRDYYMAWVRQAPKKGLEWVASISYEGNPYYGDSVKGRFTISRNNAKSTLYLQMNSLRSEDTATYYCARHDHNNVDWFAYWGQGTLVTVSS

SEQ ID NO: 1962 - protein, 112 aa, Artificial Sequence
  source: /note="Description of Artificial Sequence: Synthetic polypeptide"
DIVMTQTPSSQAVSAGEKVTMSCKSSQSLLYSENKKNYLAWYQQKPGQSPKLLIFWASTRESGVPDRFIGSGSGTDFTLTISSVQAEDLAVYYCQQYYNFPTFGSGTKLEIK

SEQ ID NO: 1963 - protein, 20 aa, Artificial Sequence
  source: /note="Description of Artificial Sequence: Synthetic peptide"
GGGGSGGGGSGGGGSGGGGS

SEQ ID NO: 1964 - protein, 251 aa, Artificial Sequence
  source: /note="Description of Artificial Sequence: Synthetic polypeptide"
EVQLVESGGGLVQPGRSLKLSCAASGFTFRDYYMAWVRQAPKKGLEWVASISYEGNPYYGDSVKGRFTISRNNAKSTLYLQMNSLRSEDTATYYCARHDHNNVDWFAYWGQGTLVTVSSGGGGSGGGGSGGGGSGGGGSDIVMTQTPSSQAVSAGEKVTMSCKSSQSLLYSENKKNYLAWYQQKPGQSPKLLIFWASTRESGVPDRFIGSGSGTDFTLTISSVQAEDLAVYYCQQYYNFPTFGSGTKLEIK

SEQ ID NO: 1965 - protein, 122 aa, Artificial Sequence
  source: /note="Description of Artificial Sequence: Synthetic polypeptide"
EVQLQQSGAELVKPGASVKMSCKASGYTFTSYNMHWVKQTPGQGLEWIGAIYPGNGDTSYNQKFKGKATLTADKSSSTAYMQLSSLTSEDSADYYCARSNYYGSSYWFFDVWGAGTTVTVSS

SEQ ID NO: 1966 - DNA, 366 bp, Artificial Sequence
  source: /note="Description of Artificial Sequence: Synthetic polynucleotide"
gaggtgcaactgcagcagtcaggagcagaactggtcaagccgggcgcatccgtcaagatgagctgcaaggcctcaggatacaccttcacttcatacaacatgcactgggtcaagcagacgcctgggcaggggctggagtggatcggtgccatctaccccggaaacggcgacacctcctacaaccagaagttcaagggaaaggccaccctcaccgctgataagtccagcagcaccgcctacatgcaactgtcgtccctgacttcggaggacagcgctgactactattgcgcccgctctaattactacggttcctcctactggttcttcgacgtgtggggcgcgggtaccactgtgactgtctccagc

SEQ ID NO: 1967 - protein, 106 aa, Artificial Sequence
  source: /note="Description of Artificial Sequence: Synthetic polypeptide"
DIVLTQSPAILSASPGEKVTMTCRASSSVNYMDWYQKKPGSSPKPWIYATSNLASGVPARFSGSGSGTSYSLTISRVEAEDAATYYCQQWSFNPPTFGGGTKLEIK

SEQ ID NO: 1968 - DNA, 318 bp, Artificial Sequence
  source: /note="Description of Artificial Sequence: Synthetic polynucleotide"
gacatcgtgctcactcagtcgcccgccattctgagcgctagccccggcgaaaaggtcaccatgacctgtagagcgtcatcctcggtgaactacatggactggtaccagaagaagccgggatcgagccctaagccatggatctacgccacatccaatctggcgtccggcgtgccggcccggttcagcgggagcggctcaggcacctcctattccctcaccatctcgagagtggaggctgaggatgcagccacgtactactgtcagcagtggtcgttcaaccccccaacctttggtggtggaaccaagctggaaatcaag

SEQ ID NO: 1969 - protein, 18 aa, Artificial Sequence
  source: /note="Description of Artificial Sequence: Synthetic peptide"
GSTSGGGSGGGSGGGGSS

SEQ ID NO: 1970 - protein, 246 aa, Artificial Sequence
  source: /note="Description of Artificial Sequence: Synthetic polypeptide"
DIVLTQSPAILSASPGEKVTMTCRASSSVNYMDWYQKKPGSSPKPWIYATSNLASGVPARFSGSGSGTSYSLTISRVEAEDAATYYCQQWSFNPPTFGGGTKLEIKGSTSGGGSGGGSGGGGSSEVQLQQSGAELVKPGASVKMSCKASGYTFTSYNMHWVKQTPGQGLEWIGAIYPGNGDTSYNQKFKGKATLTADKSSSTAYMQLSSLTSEDSADYYCARSNYYGSSYWFFDVWGAGTTVTVSS

SEQ ID NO: 1971 - DNA, 738 bp, Artificial Sequence
  source: /note="Description of Artificial Sequence: Synthetic polynucleotide"
gacatcgtgctcactcagtcgcccgccattctgagcgctagccccggcgaaaaggtcaccatgacctgtagagcgtcatcctcggtgaactacatggactggtaccagaagaagccgggatcgagccctaagccatggatctacgccacatccaatctggcgtccggcgtgccggcccggttcagcgggagcggctcaggcacctcctattccctcaccatctcgagagtggaggctgaggatgcagccacgtactactgtcagcagtggtcgttcaaccccccaacctttggtggtggaaccaagctggaaatcaagggaagcacctccggcggaggttccggaggagggtccggaggcggaggcagctccgaggtgcaactgcagcagtcaggagcagaactggtcaagccgggcgcatccgtcaagatgagctgcaaggcctcaggatacaccttcacttcatacaacatgcactgggtcaagcagacgcctgggcaggggctggagtggatcggtgccatctaccccggaaacggcgacacctcctacaaccagaagttcaagggaaaggccaccctcaccgctgataagtccagcagcaccgcctacatgcaactgtcgtccctgacttcggaggacagcgctgactactattgcgcccgctctaattactacggttcctcctactggttcttcgacgtgtggggcgcgggtaccactgtgactgtctccagc

SEQ ID NO: 1972 - protein, 253 aa, Artificial Sequence
  source: /note="Description of Artificial Sequence: Synthetic polypeptide"
EVQLQQSGPGLVKPSQTLSLTCAISGDSMLSNSDTWNWIRQSPSRGLEWLGRTYHRSTWYDDYASSVRGRVSINVDTSKNQYSLQLNAVTPEDTGVYYCARVRLQDGNSWSDAFDVWGQGTMVTVSSGGGGSGGGGSGGGGSQSALTQPASASGSPGQSVTISCTGTSSDVGGYNYVSWYQQHPGKAPKLMIYDVSNRPSGVSNRFSGSKSGNTASLTISGLQAEDEADYYCSSYTSSSTLYVFGTGTQLTVL

SEQ ID NO: 1973 - protein, 238 aa, Artificial Sequence
  source: /note="Description of Artificial Sequence: Synthetic polypeptide"
EVQLQQSGPGLVKPSQTLSLTCAISGDSMLSNSDTWNWIRQSPSRGLEWLGRTYHRSTWYDDYASSVRGRVSINVDTSKNQYSLQLNAVTPEDTGVYYCARVRLQDGNSWSDAFDVWGQGTMVTVSSQSALTQPASASGSPGQSVTISCTGTSSDVGGYNYVSWYQQHPGKAPKLMIYDVSNRPSGVSNRFSGSKSGNTASLTISGLQAEDEADYYCSSYTSSSTLYVFGTGTQLTVL

SEQ ID NO: 1974 - protein, 127 aa, Artificial Sequence
  source: /note="Description of Artificial Sequence: Synthetic polypeptide"
EVQLQQSGPGLVKPSQTLSLTCAISGDSMLSNSDTWNWIRQSPSRGLEWLGRTYHRSTWYDDYASSVRGRVSINVDTSKNQYSLQLNAVTPEDTGVYYCARVRLQDGNSWSDAFDVWGQGTMVTVSS

SEQ ID NO: 1975 - protein, 111 aa, Artificial Sequence
  source: /note="Description of Artificial Sequence: Synthetic polypeptide"
QSALTQPASASGSPGQSVTISCTGTSSDVGGYNYVSWYQQHPGKAPKLMIYDVSNRPSGVSNRFSGSKSGNTASLTISGLQAEDEADYYCSSYTSSSTLYVFGTGTQLTVL

SEQ ID NO: 1976 - protein, 12 aa, Artificial Sequence
  source: /note="Description of Artificial Sequence: Synthetic peptide"
GDSMLSNSDTWN

SEQ ID NO: 1977 - protein, 7 aa, Artificial Sequence
  source: /note="Description of Artificial Sequence: Synthetic peptide"
SNSDTWN

SEQ ID NO: 1978 - protein, 18 aa, Artificial Sequence
  source: /note="Description of Artificial Sequence: Synthetic peptide"
RTYHRSTWYDDYASSVRG

SEQ ID NO: 1979 - protein, 18 aa, Artificial Sequence
  source: /note="Description of Artificial Sequence: Synthetic peptide"
RTYHRSTWYDDYASSVRG

SEQ ID NO: 1980 - protein, 15 aa, Artificial Sequence
  source: /note="Description of Artificial Sequence: Synthetic peptide"
VRLQDGNSWSDAFDV

SEQ ID NO: 1981 - protein, 15 aa, Artificial Sequence
  source: /note="Description of Artificial Sequence: Synthetic peptide"
VRLQDGNSWSDAFDV

SEQ ID NO: 1982 - protein, 14 aa, Artificial Sequence
  source: /note="Description of Artificial Sequence: Synthetic peptide"
TGTSSDVGGYNYVS

SEQ ID NO: 1983 - protein, 7 aa, Artificial Sequence
  source: /note="Description of Artificial Sequence: Synthetic peptide"
DVSNRPS

SEQ ID NO: 1984 - protein, 11 aa, Artificial Sequence
  source: /note="Description of Artificial Sequence: Synthetic peptide"
SSYTSSSTLYV

SEQ ID NO: 1985 - protein, 18 aa, Artificial Sequence
  source: /note="Description of Artificial Sequence: Synthetic peptide"
GSTSGSGKPGSGEGSTKG

SEQ ID NO: 1986 - protein, 121 aa, Artificial Sequence
  source: /note="Description of Artificial Sequence: Synthetic polypeptide"
QVQLVQSGAEVKKPGSSVKVSCKASGGTFSSYAISWVRQAPGQGLEWMGGIIPIFGTANYAQKFQGRVTITADESTSTAYMELSSLRSEDTAVYYCARGLWEVRALPSVYWGQGTLVTVSS

SEQ ID NO: 1987 - protein, 109 aa, Artificial Sequence
  source: /note="Description of Artificial Sequence: Synthetic polypeptide"
SYELTQPPSVSVAPGQTARITCGANDIGSKSVHWYQQKAGQAPVLVVSEDIIRPSGIPERISGSNSGNTATLTISRVEAGDEADYYCQVWDRDSDQYVFGTGTKVTVLG

SEQ ID NO: 1988 - protein, 447 aa, Artificial Sequence
  source: /note="Description of Artificial Sequence: Synthetic polypeptide"
QVQLVQSGAEVKKPGSSVKVSCKASGYTFSSNVISWVRQAPGQGLEWMGGVIPIVDIANYAQRFKGRVTITADESTSTTYMELSSLRSEDTAVYYCASTLGLVLDAMDYWGQGTLVTVSSASTKGPSVFPLAPCSRSTSESTAALGCLVKDYFPEPVTVSWNSGALTSGVHTFPAVLQSSGLYSLSSVVTVPSSSLGTKTYTCNVDHKPSNTKVDKRVESKYGPPCPSCPAPEFLGGPSVFLFPPKPKDTLMISRTPEVTCVVVDVSQEDPEVQFNWYVDGVEVHNAKTKPREEQFNSTYRVVSVLTVLHQDWLNGKEYKCKVSNKGLPSSIEKTISKAKGQPREPQVYTLPPSQEEMTKNQVSLTCLVKGFYPSDIAVEWESNGQPENNYKTTPPVLDSDGSFFLYSRLTVDKSRWQEGNVFSCSVMHEALHNHYTQKSLSLSLGK

SEQ ID NO: 1989 - protein, 215 aa, Artificial Sequence
  source: /note="Description of Artificial Sequence: Synthetic polypeptide"
ETVLTQSPGTLSLSPGERATLSCRASQSLGSSYLAWYQQKPGQAPRLLIYGASSRAPGIPDRFSGSGSGTDFTLTISRLEPEDFAVYYCQQYADSPITFGQGTRLEIKRTVAAPSVFIFPPSDEQLKSGTASVVCLLNNFYPREAKVQWKVDNALQSGNSQESVTEQDSKDSTYSLSSTLTLSKADYEKHKVYACEVTHQGLSSPVTKSFNRGEC

SEQ ID NO: 1990 - protein, 117 aa, Artificial Sequence
  source: /note="Description of Artificial Sequence: Synthetic polypeptide"
EVQLLESGGGLVQPGGSLRLSCAASGFTFSSYAYSWVRQAPGKGLEWVSAISGSGGRTYYADSVKGRFTISRDNSKNTLYLQMNSLRAEDTAVYYCARLGYGRVDEWGRGTLVTVSS

SEQ ID NO: 1991 - protein, 110 aa, Artificial Sequence
  source: /note="Description of Artificial Sequence: Synthetic polypeptide"
QSVLTQPPSASGTPGQRVTISCSGSLSNIGRNPVNWYQQLPGTAPKLLIYLDNLRLSGVPDRFSGSKSGTSASLAISGLQSEDEADYYCATWDDSHPGWTFGGGTKLTVL

SEQ ID NO: 1992 - protein, 447 aa, Artificial Sequence
  source: /note="Description of Artificial Sequence: Synthetic polypeptide"
QVQLVESGGGVVQPGRSLRLSCATSGFTFSNYGMHWVRQAPGKGLEWVAVILYDGSNKYYPDSVKGRFTISRDNSKNTLYLQMNSLRAEDTAVYYCARGGSSWYPDSFDIWGQGTMVTVSSASTKGPSVFPLAPCSRSTSESTAALGCLVKDYFPEPVTVSWNSGALTSGVHTFPAVLQSSGLYSLSSVVTVPSSNFGTQTYTCNVDHKPSNTKVDKTVERKCCVECPPCPAPPVAGPSVFLFPPKPKDTLMISRTPEVTCVVVDVSHEDPEVQFNWYVDGVEVHNAKTKPREEQFNSTFRVVSVLTVVHQDWLNGKEYKCKVSNKGLPAPIEKTISKTKGQPREPQVYTLPPSREEMTKNQVSLTCLVKGFYPSDIAVEWESNGQPENNYKTTPPMLDSDGSFFLYSKLTVDKSRWQQGNVFSCSVMHEALHNHYTQKSLSLSPGK

SEQ ID NO: 1993 - protein, 214 aa, Artificial Sequence
  source: /note="Description of Artificial Sequence: Synthetic polypeptide"
DIQMTQSPSSLSASVGDRVTITCRASQGISSWLAWYQQKPEKAPKSLIYAASSLQSGVPSRFSGSGSGTDFTLTISSLQPEDFATYYCQQYNSYPLTFGGGTKVEIKRTVAAPSVFIFPPSDEQLKSGTASVVCLLNNFYPREAKVQWKVDNALQSGNSQESVTEQDSKDSTYSLSSTLTLSKADYEKHKVYACEVTHQGLSSPVTKSFNRGEC

SEQ ID NO: 1994 - protein, 121 aa, Artificial Sequence
  source: /note="Description of Artificial Sequence: Synthetic polypeptide"
QVQLVESGGGVVQPGRSLRLSCATSGFTFSNYGMHWVRQAPGKGLEWVAVILYDGSNKYYPDSVKGRFTISRDNSKNTLYLQMNSLRAEDTAVYYCARGGSSWYPDSFDIWGQGTMVTVSS

SEQ ID NO: 1995 - protein, 107 aa, Artificial Sequence
  source: /note="Description of Artificial Sequence: Synthetic polypeptide"
DIQMTQSPSSLSASVGDRVTITCRASQGISSWLAWYQQKPEKAPKSLIYAASSLQSGVPSRFSGSGSGTDFTLTISSLQPEDFATYYCQQYNSYPLTFGGGTKVEIK

SEQ ID NO: 1996 - protein, 447 aa, Artificial Sequence; identical to SEQ ID NO: 1992
  source: /note="Description of Artificial Sequence: Synthetic polypeptide"

SEQ ID NO: 1997 - protein, 214 aa, Artificial Sequence
  source: /note="Description of Artificial Sequence: Synthetic polypeptide"
EIVLTQSPATLSLSPGERATLSCRASQGVSSYLAWYQQKPGQAPRLLIYDASNRATGIPARFSGSGPGTDFTLTISSLEPEDFAVYYCQQRSNWHLTFGGGTKVEIKRTVAAPSVFIFPPSDEQLKSGTASVVCLLNNFYPREAKVQWKVDNALQSGNSQESVTEQDSKDSTYSLSSTLTLSKADYEKHKVYACEVTHQGLSSPVTKSFNRGEC

SEQ ID NO: 1998 - protein, 121 aa, Artificial Sequence; identical to SEQ ID NO: 1994
  source: /note="Description of Artificial Sequence: Synthetic polypeptide"

SEQ ID NO: 1999 - protein, 107 aa, Artificial Sequence
  source: /note="Description of Artificial Sequence: Synthetic polypeptide"
EIVLTQSPATLSLSPGERATLSCRASQGVSSYLAWYQQKPGQAPRLLIYDASNRATGIPARFSGSGPGTDFTLTISSLEPEDFAVYYCQQRSNWHLTFGGGTKVEIK

SEQ ID NO: 2000 - protein, 121 aa, Artificial Sequence
  source: /note="Description of Artificial Sequence: Synthetic polypeptide"
QVQLVESGGGVVQPGRSLRLSCAASGFTFSNYGMHWVRQAPGKGLEWVAVILYDGSNKYYPDSVKGRFTISRDNSKNTLYLQMNSLRAEDTAVYYCARGGSSWYPDSFDIWGQGTMVTVSS

SEQ ID NO: 2001 - protein, 107 aa, Artificial Sequence; identical to SEQ ID NO: 1995
  source: /note="Description of Artificial Sequence: Synthetic polypeptide"

SEQ ID NO: 2002 - protein, 121 aa, Artificial Sequence
  source: /note="Description of Artificial Sequence: Synthetic polypeptide"
QVQLVESGGGVVQPGRSLRLSCAASGFTFSNYGMHWVRQAPGKGLEWVAVIWYDESNKYYPDSVKGRFTISRDNSKNTLYLQMNSLRAEDTAVYYCARGGSSWYPDSFDIWGQGTMVTVSS

SEQ ID NO: 2003 - protein, 107 aa, Artificial Sequence; identical to SEQ ID NO: 1995
  source: /note="Description of Artificial Sequence: Synthetic polypeptide"

SEQ ID NO: 2004 - protein, 122 aa, Artificial Sequence
  source: /note="Description of Artificial Sequence: Synthetic polypeptide"
EVQLVESGGGLVQPGRSLRLSCAASGFTFDDYAMHWVRQAPGKGLEWVSGISWNSGSIGYADSVKGRFTISRDNAKNSLYLQMNSLRAEDTALYYCVRSGSYNYYYYGMDVWGQGTTVTVSR

SEQ ID NO: 2005 - protein, 111 aa, Artificial Sequence
  source: /note="Description of Artificial Sequence: Synthetic polypeptide"
QSVLTQPPSASGTPGQRVTISCSGSSSNIGSNTVNWYQQLPGTAPKLLIYSNNQRPSGVPDRFSGSKSGTSASLAISGLQSEDEADYYCAAWDDSLNGWVFGGGTKLTVLG

SEQ ID NO: 2006 - protein, 127 aa, Artificial Sequence [sequence omitted]

SEQ ID NO: 2007 - protein, 109 aa, Artificial Sequence
  source: /note="Description of Artificial Sequence: Synthetic polypeptide"
EIVLTQSPGTLSLSPGERATLSCRASQSVSSSYLAWYQQKPGQAPRLLIYGASSRATGIPDRFSGSGSGTDFTLTISRLEPEDFAVYYCQQYGSSPCTFGQGTRLEIKR

SEQ ID NO: 2008 - protein, 5 aa, Artificial Sequence
  source: /note="Description of Artificial Sequence: Synthetic peptide"
NYWMN

SEQ ID NO: 2009 - protein, 17 aa, Artificial Sequence
  source: /note="Description of Artificial Sequence: Synthetic peptide"
AINQDGSEKYYVGSVKG

SEQ ID NO: 2010 - protein, 18 aa, Artificial Sequence
  source: /note="Description of Artificial Sequence: Synthetic peptide"
DYYDILTDYYIHYWYFDL

SEQ ID NO: 2011 - protein, 12 aa, Artificial Sequence
  source: /note="Description of Artificial Sequence: Synthetic peptide"
RASQSVSSSYLA

SEQ ID NO: 2012 - protein, 7 aa, Artificial Sequence
  source: /note="Description of Artificial Sequence: Synthetic peptide"
GASSRAT

SEQ ID NO: 2013 - protein, 7 aa, Artificial Sequence
  source: /note="Description of Artificial Sequence: Synthetic peptide"
GASSRAT

SEQ ID NO: 2014 - protein, 446 aa, Artificial Sequence
  source: /note="Description of Artificial Sequence: Synthetic polypeptide"
EVQLVESGGDLVQPGGSLRLSCAASGFTFSSYWMSWVRQAPGKGLEWVANIKQDGSEKYYVDSVKGRFTISRDNAKNSLYLQMNSLRAEDTAVYYCARDRGSLYYWGQGTLVTVSSASTKGPSVFPLAPSSKSTSGGTAALGCLVKDYFPEPVTVSWNSGALTSGVHTFPAVLQSSGLYSLSSVVTVPSSSLGTQTYICNVNHKPSNTKVDKRVEPKSCDKTHTCPPCPAPELLGGPSVFLFPPKPKDTLMISRTPEVTCVVVDVSHEDPEVKFNWYVDGVEVHNAKTKPREEQYNSTYRVVSVLTVLHQDWLNGKEYKCKVSNKALPAPIEKTISKAKGQPREPQVYTLPPSREEMTKNQVSLTCLVKGFYPSDIAVEWESNGQPENNYKTTPPVLDSDGSFFLYSKLTVDKSRWQQGNVFSCSVMHEALHNHYTQKSLSLSPGK

SEQ ID NO: 2015 - protein, 214 aa, Artificial Sequence
  source: /note="Description of Artificial Sequence: Synthetic polypeptide"
AIQLTQSPSSLSASVGDRVTITCRPSQGINWELAWYQQKPGKAPKLLIYDASSLEQGVPSRFSGSGSGTDFTLTISSLQPEDFATYYCQQFNSYPLTFGGGTKVEIKRTVAAPSVFIFPPSDEQLKSGTASVVCLLNNFYPREAKVQWKVDNALQSGNSQESVTEQDSKDSTYSLSSTLTLSKADYEKHKVYACEVTHQGLSSPVTKSFNRGEC

SEQ ID NO: 2016 - protein, 119 aa, Artificial Sequence
  source: /note="Description of Artificial Sequence: Synthetic polypeptide"
QVQLVQSGAEVKKPGSSVKVSCKASGYSFTDYHIHWVRQAPGQGLEWMGVINPMYGTTDYNQRFKGRVTITADESTSTAYMELSSLRSEDTAVYYCARYDYFTGTGVYWGQGTLVTVSS

SEQ ID NO: 2017 - protein, 112 aa, Artificial Sequence
  source: /note="Description of Artificial Sequence: Synthetic polypeptide"
DIVMTQTPLSLSVTPGQPASISCRSSRSLVHSRGNTYLHWYLQKPGQSPQLLIYKVSNRFIGVPDRFSGSGSGTDFTLKISRVEAEDVGVYYCSQSTHLPFTFGQGTKLEIK

SEQ ID NO: 2018 - protein, 5 aa, Artificial Sequence
  source: /note="Description of Artificial Sequence: Synthetic peptide"
RYGIS

SEQ ID NO: 2019 - protein, 17 aa, Artificial Sequence
  source: /note="Description of Artificial Sequence: Synthetic peptide"
WISTYSGNTNYAQKLQG

SEQ ID NO: 2020 - protein, 7 aa, Artificial Sequence
  source: /note="Description of Artificial Sequence: Synthetic peptide"
RQLYFDY

SEQ ID NO: 2021 - protein, 11 aa, Artificial Sequence
  source: /note="Description of Artificial Sequence: Synthetic peptide"
RASQSVSSNLA

SEQ ID NO: 2022 - protein, 7 aa, Artificial Sequence
  source: /note="Description of Artificial Sequence: Synthetic peptide"
DASTRAT

SEQ ID NO: 2023 - protein, 9 aa, Artificial Sequence
  source: /note="Description of Artificial Sequence: Synthetic peptide"
QQYDNWPLT

SEQ ID NO: 2024 - DNA, 400 bp, Artificial Sequence
  source: /note="Description of Artificial Sequence: Synthetic polynucleotide"
  misc_feature (1)..(400): /note="This sequence may encompass 100-400 nucleotides"
  source: /note="See specification as filed for detailed description of substitutions and preferred embodiments"
aaaaaaaaaaaaaaaaaaaaaaaaaaaaaaaaaaaaaaaaaaaaaaaaaaaaaaaaaaaaaaaaaaaaaaaaaaaaaaaaaaaaaaaaaaaaaaaaaaaaaaaaaaaaaaaaaaaaaaaaaaaaaaaaaaaaaaaaaaaaaaaaaaaaaaaaaaaaaaaaaaaaaaaaaaaaaaaaaaaaaaaaaaaaaaaaaaaaaaaaaaaaaaaaaaaaaaaaaaaaaaaaaaaaaaaaaaaaaaaaaaaaaaaaaaaaaaaaaaaaaaaaaaaaaaaaaaaaaaaaaaaaaaaaaaaaaaaaaaaaaaaaaaaaaaaaaaaaaaaaaaaaaaaaaaaaaaaaaaaaaaaaaaaaaaaaaaaaaaaaaaaaaaaaaaaaaaaaaaaaaaaaaaaaaaaaaaaaaaaa

SEQ ID NO: 2025 - DNA, 2000 bp, Artificial Sequence
  source: /note="Description of Artificial Sequence: Synthetic polynucleotide"
  misc_feature (1)..(2000): /note="This sequence may encompass 50-2000 nucleotides"
aaaaaaaaaaaaaaaaaaaaaaaaaaaaaaaaaaaaaaaaaaaaaaaaaaaaaaaaaaaaaaaaaaaaaaaaaaaaaaaaaaaaaaaaaaaaaaaaaaaaaaaaaaaaaaaaaaaaaaaaaaaaaaaaaaaaaaaaaaaaaaaaaaaaaaaaaaaaaaaaaaaaaaaaaaaaaaaaaaaaaaaaaaaaaaaaaaaaaaaaaaaaaaaaaaaaaaaaaaaaaaaaaaaaaaaaaaaaaaaaaaaaaaaaaaaaaaaaaaaaaaaaaaaaaaaaaaaaaaaaaaaaaaaaaaaaaaaaaaaaaaaaaaaaaaaaaaaaaaaaaaaaaaaaaaaaaaaaaaaaaaaaaaaaaaaaaaaaaaaaaaaaaaaaaaaaaaaaaaaaaaaaaaaaaaaaaaaaaaaaaaaaaaaaaaaaaaaaaaaaaaaaaaaaaaaaaaaaaaaaaaaaaaaaaaaaaaaaaaaaaaaaaaaaaaaaaaaaaaaaaaaaaaaaaaaaaaaaaaaaaaaaaaaaaaaaaaaaaaaaaaaaaaaaaaaaaaaaaaaaaaaaaaaaaaaaaaaaaaaaaaaaaaaaaaaaaaaaaaaaaaaaaaaaaaaaaaaaaaaaaaaaaaaaaaaaaaaaaaaaaaaaaaaaaaaaaaaaaaaaaaaaaaaaaaaaaaaaaaaaaaaaaaaaaaaaaaaaaaaaaaaaaaaaaaaaaaaaaaaaaaaaaaaaaaaaaaaaaaaaaaaaaaaaaaaaaaaaaaaaaaaaaaaaaaaaaaaaaaaaaaaaaaaaaaaaaaaaaaaaaaaaaaaaaaaaaaaaaaaaaaaaaaaaaaaaaaaaaaaaaaaaaaaaaaaaaaaaaaaaaaaaaaaaaaaaaaaaaaaaaaaaaaaaaaaaaaaaaaaaaaaaaaaaaaaaaaaaaaaaaaaaaaaaaaaaaaaaaaaaaaaaaaaaaaaaaaaaaaaaaaaaaaaaaaaaaaaaaaaaaaaaaaaaaaaaaaaaaaaaaaaaaaaaaaaaaaaaaaaaaaaaaaaaaaaaaaaaaaaaaaaaaaaaaaaaaaaaaaaaaaaaaaaaaaaaaaaaaaaaaaaaaaaaaaaaaaaaaaaaaaaaaaaaaaaaaaaaaaaaaaaaaaaaaaaaaaaaaaaaaaaaaaaaaaaaaaaaaaaaaaaaaaaaaaaaaaaaaaaaaaaaaaaaaaaaaaaaaaaaaaaaaaaaaaaaaaaaaaaaaaaaaaaaaaaaaaaaaaaaaaaaaaaaaaaaaaaaaaaaaaaaaaaaaaaaaaaaaaaaaaaaaaaaaaaaaaaaaaaaaaaaaaaaaaaaaaaaaaaaaaaaaaaaaaaaaaaaaaaaaaaaaaaaaaaaaaaaaaaaaaaaaaaaaaaaaaaaaaaaaaaaaaaaaaaaaaaaaaaaaaaaaaaaaaaaaaaaaaaaaaaaaaaaaaaaaaaaaaaaaaaaaaaaaaaaaaaaaaaaaaaaaaaaaaaaaaaaaaaaaaaaaaaaaaaaaaaaaaaaaaaaaaaaaaaaaaaaaaaaaaaaaaaaaaaaaaaaaaaaaaaaaaaaaaaaaaaaaaaaaaaaaaaaaaaaaaaaaaaaaaaaaaaaaaaaaaaaaaaaaaaaaaaaaaaaaaaaaaaaaaaaaaaaaaaaaaaaaaaaaaaaaaaaaaaaaaaaaaaaaaaaaaaaaaaaaaaaaaaaaaaaaaaaaaaaaaaaaaaaaaaaaaaaaaaaaaaaaaaaaaaaaaaaaaaaaaaaaaaaaaaaaaaaaaaaaaaaaaaaaaaaaaaaaaaaaaaaaaaaaaaaaaaaaaaaaaaaaaaaaaaaaaaaaaaaaaaaaaaaaaaaaaaaaaaaaaaaaaaaaaaaaaaaaaaaaaaaaaaaaaaaaaaaaaaaaaaaaaaaaaaaaaaaaaaaaaaaaaaaaaaaaaaaaaaaaaaaaaaaaaaaaaaaaaaaaaaaaaaaaaaaaaaaaaaaaaaaaaaaaaaaaaaaaaaaaaaaaaaaaaaaaaaaaaaaaaaaaaaaaaaaaaaaaaaaaaaaaaaa

SEQ ID NO: 2026 - DNA, 100 bp, Artificial Sequence
  source: /note="Description of Artificial Sequence: Synthetic polynucleotide"
tttttttttttttttttttttttttttttttttttttttttttttttttttttttttttttttttttttttttttttttttttttttttttttttttttt

SEQ ID NO: 2027 - DNA, 5000 bp, Artificial Sequence
  source: /note="Description of Artificial Sequence: Synthetic polynucleotide"
  misc_feature (1)..(5000): /note="This sequence may encompass 50-5000 nucleotides"
tttttttttttttttttttttttttttttttttttttttttttttttttttttttttttttttttttttttttttttttttttttttttttttttttttttttttttttttttttttttttttttttttttttttttttttttttttttttttttttttttttttttttttttttttttttttttttttttttttttttttttttttttttttttttttttttttttttttttttttttttttttttttttttttttttttttttttttttttttttttttttttttttttttttttttttttttttttttttttttttttttttttttttttttttttttttttttttttttttttttttttttttttttttttttttttttttttttttttttttttttttttttttttttttttttttttttttttttttttttttttttttttttttttttttttttttttttttttttttttttttttttttttttttttttttttttttttttttttttttttttttttttttttttttttttttttttttttttttttttttttttttttttttttttttttttttttttttttttttttttttttttttttttttttttttttttttttttttttttttttttttttttttttttttttttttttttttttttttttttttttttttttttttttttttttttttttttttttttttttttttttttttttttttttttttttttttttttttttttttttttttttttttttttttttttttttttttttttttttttttttttttttttttttttttttttttttttttttttttttttttttttttttttttttttttttttttttttttttttttttttttttttttttttttttttttttttttttttttttttttttttttttttttttttttttttttttttttttttttttttttttttttttttttttttttttttttttttttttttttttttttttttttttttttttttttttttttttttttttttttttttttttttttttttttttttttttttttttttttttttttttttttttttttttttttttttttttttttttttttttttttttttttttttttttttttttttttttttttttttttttttttttttttttttttttttttttttttttttttttttttttttttttttttttttttttttttttttttttttttttttttttttttttttttttttttttttttttttttttttttttttttttttttttttttttttttttttttttttttttttttttttttttttttttttttttttttttttttttttttttttttttttttttttttttttttttttttttttttttttttttttttttttttttttttttttttttttttttttttttttttttttttttttttttttttttttttttttttttttttttttttttttttttttttttttttttttttttttttttttttttttttttttttttttttttttttttttttttttttttttttttttttttttttttttttttttttttttttttttttttttttttttttttttttttttttttttttttttttttttttttttttttttttttttttttttttttttttttttttttttttttttttttttttttttttttttttttttttttttttttttttttttttttttttttttttttttttttttttttttttttttttttttttttttttttttttttttttttttttttttttttttttttttttttttttttttttttttttttttttttttttttttttttttttttttttttttttttttttttttttttttttttttttttttttttttttttttttttttttttttttttttttttttttttttttttttttttttttttttttttttttttttttttttttttttttttttttttttttttttttttttttttttttttttttttttttttttttttttttttttttttttttttttttttttttttttttttttttttttttttttttttttttttttttttttttttttttttttttttttttttttttttttttttttttttttttttttttttttttttttttttttttttttttttttttttttttttttttttttttttttttttttttttttttttttttttttttttttttttttttttttttttttttttttttttttttttttttttttttttttttttttttttttttttttttttttttttttttttttttttttttttttttttttttttttttttttttttttttttttttttttttttttttttttttttttttttttttttttttttttttttttttttttttttttttttttttttttttttttttttttttttttttttttttttttttttttttttttttttttttttttttttttttttttttttttttttttttttttttttttttttttttttttttttttttttttttttttttttttttttttttttttttttttttttttttttttttttttttttttttttttttttttttttttttttttttttttttttttttttttttttttttttttttttttttttttttttttttttttttttttttttttttttttttttttttttttttttttttttttttttttttttttttttttttttttttttttttttttttttttttttttttttttttttttttttttttttttttttttttttttttttttttttttttttttttttttttttttttttttttttttttttttttttttttttttttttttttttttttttttttttttttttttttttttttttttttttttttttttttttttttttttttttttttttttttttttttttttttttttttttttttttttttttttttttttttttttttttttttttttttttttttttttttttttttttttttttttttttttttttttttttttttttttttttttttttttttttttttttttttttttttttttttttttttttttttttttttttttttttttttttttttttttttttttttttttttttttttttttttttttttttttttttttttttttttttttttttttttttttttttttttttttttttttttttttttttttttttttttttttttttttttttttttttttttttttttttttttttttttttttttttttttttttttttttttttttttttttttttttttttttttttttttttttttttttttttttttttttttttttttttttttttttttttttttttttttttttttttttttttttttttttttttttttttttttttttttttttttttttttttttttttttttttttttttttttttttttttttttttttttttttttttttttttttttttttttttttttttttttttttttttttttttttttttttttttttttttttttttttttttttttttttttttttttttttttttttttttttttttttttttttttttttttttttttttttttttttttttttttttttttttttttttttttttttttttttttttttttttttttttttttttttttttttttttttttttttttttttttttttttttttttttttttttttttttttttttttttttttttttttttttttttttttttttttttttttttttttttttttttttttttttttttttttttttttttttttttttttttttttttttttttttttttttttttttttttttttttttttttttttttttttttttttttttttttttttttttttttttttttttttttttttttttttttttttttttttttttttttttttttttttttttttttttttttttttttttttttttttttttttttttttttttttttttttttttttttttttttttttttttttttttttttttttttttttttttttttttttttttttttttttttttttttttttttttttttttttttttttttttttttttttttttttttttttttttttttttttttttttttttttttttttttttttttttttttttttttttttttttttttttttttttttttttttttttttttttttttttttttttttttttttttttttttttttttttttttttttttttttttttttttttttttttttttttttttttttttttttttttttttttttttttttttttttttttttttttttttttttttttttttttttttttttttttttttttttttttttttttttttttttttttttttttttttttttttttttttttttttttttttttttttttttttttttttttttttttttttttttttttttttttttttttttttttttttttttttttttttttttttttttttttttttttttttttttttttttttttttttttttttttttttttttttttttttttttttttttttttttttttttttttttttttttttttttttttttttttttttttttttttttttttttttttttttttttttttttttttttttttttttttttttttttttttttttttttttttttttttttttttttttttttttttttttttttttttttttttttttttttttttttttttttttttttttttttttttttttttttttttttttttttttttttttttttttttttttttttttttttttttttttttttttttttttttttttttttttttttttttttttttttttttttttttttttttttttttttttttttttttttttttttttttttttttttttttttttttttttttttttttttttttttttttttttttttttttttttttttttttttttt

SEQ ID NO: 2028 - DNA, 5000 bp, Artificial Sequence; identical to SEQ ID NO: 1043
  source: /note="Description of Artificial Sequence: Synthetic polynucleotide"
  misc_feature (1)..(5000): /note="This sequence may encompass 100-5000 nucleotides"

SEQ ID NO: 2029 - protein, 486 aa, Artificial Sequence; identical to SEQ ID NO: 1300
  source: /note="Description of Artificial Sequence: Synthetic polypeptide"
  VARIANT (1)..(21): /replace=" "
  SITE (1)..(486): /note="Variant residues given in the sequence have no preference with respect to those in the annotations for variant positions"

SEQ ID NO: 2030 - protein, 465 aa, Artificial Sequence
  source: /note="Description of Artificial Sequence: Synthetic polypeptide"
DIQMTQTTSSLSASLGDRVTISCRASQDISKYLNWYQQKPDGTVKLLIYHTSRLHSGVPSRFSGSGSGTDYSLTISNLEQEDIATYFCQQGNTLPYTFGGGTKLEITGGGGSGGGGSGGGGSEVKLQESGPGLVAPSQSLSVTCTVSGVSLPDYGVSWIRQPPRKGLEWLGVIWGSETTYYNSALKSRLTIIKDNSKSQVFLKMNSLQTDDTAIYYCAKHYYYGGSYAMDYWGQGTSVTVSSTTTPAPRPPTPAPTIASQPLSLRPEACRPAAGGAVHTRGLDFACDIYIWAPLAGTCGVLLLSLVITLYCKRGRKKLLYIFKQPFMRPVQTTQEEDGCSCRFPEEEEGGCELRVKFSRSADAPAYKQGQNQLYNELNLGRREEYDVLDKRRGRDPEMGGKPRRKNPQEGLYNELQKDKMAEAYSEIGMKGERRRGKGHDGLYQGLSTATKDTYDALHMQALPPR

SEQ ID NO: 2031 - protein, 21 aa, Artificial Sequence
  source: /note="Description of Artificial Sequence: Synthetic peptide"
MALPVTALLLPLALLLHAARP

SEQ ID NO: 2032 - DNA, 63 bp, Artificial Sequence; identical to SEQ ID NO: 1010
  source: /note="Description of Artificial Sequence: Synthetic oligonucleotide"

SEQ ID NO: 2033 - protein, 7 aa, Artificial Sequence
  source: /note="Description of Artificial Sequence: Synthetic peptide"
LAEAAAK

SEQ ID NO: 2034 - protein, 30 aa, Artificial Sequence
  source: /note="Description of Artificial Sequence: Synthetic polypeptide"
  SITE (1)..(30): /note="This sequence may encompass 1-6 'Gly Gly Gly Gly Ser' repeating units"
  source: /note="See specification as filed for detailed description of substitutions and preferred embodiments"
GGGGSGGGGSGGGGSGGGGSGGGGSGGGGS

SEQ ID NO: 2035 - protein, 4 aa, Artificial Sequence
  source: /note="Description of Artificial Sequence: Synthetic peptide"
RGDS

SEQ ID NO: 2036 - protein, 243 aa, Artificial Sequence
  source: /note="Description of Artificial Sequence: Synthetic polypeptide"
EVQLQQSGPGLVKPSQTLSLTCAISGDSMLSNSDTWNWIRQSPSRGLEWLGRTYHRSTWYDDYASSVRGRVSINVDTSKNQYSLQLNAVTPEDTGVYYCARVRLQDGNSWSDAFDVWGQGTMVTVSSGGGGSQSALTQPASASGSPGQSVTISCTGTSSDVGGYNYVSWYQQHPGKAPKLMIYDVSNRPSGVSNRFSGSKSGNTASLTISGLQAEDEADYYCSSYTSSSTLYVFGTGTQLTVL
